United States Patent Application Publication US 2023/0087228 A1 - sequence listing, part 7

SEQ ID NO: 861 - DNA, 4369 bp, Artificial Sequence
  Synthetic Oligonucleotide
atcgcaaaactctatgccttccggccgatcgagcattcacccgggcagacgcttgcgtggcagcttgggcggtaccggaacgacaatgaccccgagaaagaccctgtcgcggaaaggttcgacaggatgctgaccttgccggttgatatactcgagccggccttgcaatggtcgcttaacctcatcgcctccaaaaacccgaagctcgactgggtgacgctgacaaacgatctttccatttgggaacgcgaaaccacccggctcaagtgggccgaggaattcttgaagtcttcgaaggaggaccgtcatgttaattgaaattcatgccattcaaaatcacagcccggccaacctgaaccgggacgacttgggcgctcccaagacctgctacttcggcggagtactgcgctcccgtatttccagtcagtgcctcaagcggagcatccgcatgagtgacgaattcaagcagttgctcggcggcgttcgcacacggcgactggcgcaattgatcgctccaggcggcccggataccgccgagtttaaaaaggcgatcgcggttttagaaatctgcggcatcgcggcaaaagagaagaaagggaagaaaggcgacgacgaggaatctacgcccgacgaaaaaagcgccggagtggtttatgtgagcaaacaagcggtcaacgagatgtctgagcttctgaaaaccaagtcggccaagaccgataacgagctcgccaaggaatttgcccagataatcgctcgccatacgagcaccccggacatggcactctgtggcagaatgctggaaccaaagaaagcgaaaaagcaggcgtcggaggaaggcggcgcgaagcccaagggcggcgacgtctggaagggacttgacacaaccgttgaggcggcgctgcaagttgcccacgcaatttctactcacgcggctcgcccggagattgactactatgtggccgctgatgatgtgcccggtgaagacgcgggagcaggctttgtagatgaagcaatgttcggctccgcctgcttctacaagtatttttcgattgacttcgaaaccctcatcaacaatctgaagggcaacaaggaactggccgctcatactgtcggcgcgttcatccggggagcggcgttggtgaatcccacgggcaaacagaatagtttcgccgcgcacaacccacccgacggaatgctggtcgaaatcagaaactcacctctcagctatgccaacgcttttgcccgaccagccatagcccagggcgaacgagacatcatatcccagagcgtcgcgcaactcggccagtacgttcacgatatcgacaccggatacggcaaaccaacgaggcggttctggttctcgcccaatcttcgctatcccttgaccgttacggagggggataaggaaaacgccttggccgaaaacaatatcaagtcgctcgaggaattgatcgaggcagtcatcaagggaatcggccatgattgggaggaggttcagaaagtggttgtgaactcggaggtggcctgatgagcgcaaataccctctttctccgcctcgaagccccccttcaggcatggggcgatcagcagtcgaagtttgtgattcggcggacggctgacgccccaaccaggtctggcgtcatggggatgctttgcgcggcgttgggcgtctcccgctcggcggcgccggaaggctggcttccaaggcttagccgcctgcgcatgggcgtccgcatcgatgtgccgggggtccgctggtgggattatcacacggtgggcgccgggatgccgatgcgcactgccgaaggtggaaccaagccaggggccgtgctgacccgccgcgaatacctttgcgacgcctcgtttctcgtcgcttttcagggagagtcggacctcattgccgaactggagtccgcaattaaagcgcccaaatggacgctctatctgggcagaaagtgctgccctccctcgcgccctttactggagcatccggggggtgaatttcctgacttgctttctgccctcaaatcggttccctggcgcaagaggttggagggagacgatcagcccgaagcgctggattgcctgcttgattggaagtcaaccgaagagcagccggaggctcccgatgatgcgctcgtctggtacgacgtgcccgtgaccttcgacccgccctcccaccagccccgatttgtcattcgcaagcaactgcgcgttggactcgacggcgaagtaacgcttgcaactcagccagcacagagctacacgccagcgcctccccgcccaagagcggattacactaataccgagtacagaatccgacgggaaaagcggctcgacgacgactatcacttgtgcgtcttttgcaagtcgcccgccaccaccgtccagcacatcacctatcgccgcgcgggtggcaatgaactcgcggatgacttgcgctctctctgtcgcctctgccacgatgccgtcaccatgatcgaatatggcctaggcatgggcatggaccgcatcaacccggaagagccgcgttggcgcgacttgattatccaaaagcggaacgaaatcatcacgttccgctccctggagactcgccgcaggcgcctggtcgccgaggaggtggagtagccatgtaccggtcctgccttttgattgacgtcgggagtaaccccgaccggcctcggcccggaaggctgtggcttcggaatctctatcacgtccaccagcgcctttggatggcgtttccctccgagaaccgaaaatcccatgatcgcgattttcttaagcctttcaaacccgcggactttggcgagaagccggttcaggtagaacgcggggcgggttccggctttctttttcgcattgagccgcagcccgccgggcgggtcgtgattctcgtccagtccaactccgccgtgaagccggattgggactacgccttccacaacgcccgttttcttttgaatcctctggctgctcccccgcaggtagaggaattcgaccctcgcttcgccaagggccaacagcttcggttccgcatccgcatcaatctaagcaagaagttaaaaacgagcgcaaagggcgtcgatcttaccaaggcgggcgagggaacagatcgccaaggccgcccgaaggcccaaagcaaacgcgtagcgctgacctgggataaggaccagaaccccgacgatgtgatacgaaaatggttcgccgccaagggcgaccaaggtggcttccaggtggaaactttccgcgtcttgcaaatcgggtggggcgcaggaaaccgatcggacccgaggccggcgggcgatcgcatgaaatttcgctcagccttattggaggggacgcttacggttaaagacgcggatagcttcagagaaaccatcgtgggcggcatcgggcacggcaaagccttcggcttcgggcttctttccgtagcccctcgcacaccactcccggcagaggcaacgtgagagttctgacgccaaagcgagccccgaagcagcgcgccgagatcgcccgccgcatgtttgtgcagcgctttcccggtgtggatgtgcaggcgtattccgtcaccgaattgcggggaatggagggcttgcgcgtgcccgccaaatacgcggaactcggcgagcagtacggagtcacctggaaggggcgcaactacgacaaatccaactggaatctggcggacaacatcaatcgcgccctctcgacggccaatgccagcctttacgccttgtgcgccgccgtactctgctcgctgggttacctgccgtctctgggattcgttcacgacgccggcacgttgccctttatctatgatgtggcggacctgtacaaggaaataaccagtttcccggcagcctttcagtccatgcgccaggaccccaatgacaaaggcgacctggtccgcacgctgctgaaggaacgcgtcgagcaggagaaactgctccagagaattcccaaagacatggaggaactgtttgcatgacggtcatcgttgccaccgacacgccggatgccattcgcggaatgctgaaacgctggtttatcgagccccgcccaaacgtcttcgtcggctcactgaaccggcgcactcatgagaaaacgatcgagtacatcaagcgcaacgccggcgatatcggcctgctgatcgtcaacagctaccctaattgccagggcttcaaaatcgataccaccggccccaccgaccgcaagggcgtcgaggtgagcggtttgtggatggtggccgagaaatgggaggaccaaacgacgaccgcgccaggtcaaaccaccgattttccccctgattcctcaagctaagtcctttggaattcagggtaatccccacgcgcgtggggatggtccg

SEQ ID NO: 862 - DNA, 4347 bp, Artificial Sequence
  Synthetic Oligonucleotide
cgaccgaaactcaatgatctcagccctctttctgatgatttgctcgcgccaacgggaatcgcaggggtcaatgcgatccaggcccattcccaggccgtactcgatcatggtcacagcgtcgtgacagagtcgacagagcgagcgcagatcgtcctgctcttcattgccgccggcacgtcgatacgtgacatgttgcatggtcgtggcgggagacttgcaaaaaacgcagaggccttggtcagattccaacctttgtttgcggcgtttcctgaattccttattttggtagtctgctctcgggcgaggcggaggggacgtatgatgctggagtggcctgtcgactcgtacttcgatgcgccggtctccttccagccgcagcaccagtcgtggttcatgcactggtggatcgaaggaggctggtaaatcgtaccagacctctgcctccgcaggagcgatcacgccattgcgcggctgccattcgattatacaatccagctgtttcgtcttcgatggaattcctttgtcgtcacgaggagcgtcactcttaaatcggggacgccaaggccgcgactttaacgcctgctcgagactgtcaaatcgatccgtgtctgcagcacacttgccattatcagctttccatcctatcggtacggcaggcgggcacgacttacggccgagaaaaagcggccacttggggttctgaagcgctgtggagacctcctggattaagtctgaatcgccttttagcgccacgagaaaactagcgtcgcaaaggtactccctgcggctgatgagcgtttcaatcgggccttttgctccccccgtgcgtttgattcctccttcggcttttagcaatcccaccttggcacctacggtgtgataatcccaccatcgaatacctgtccggtcgatgcgcacgcccatcgccaacttcttcaaatccggcaaacgctcacgcgctgccttccgcgacagtcccatcgcgcagcagatgatacccaagacgccggatttggtgggagcttccatggttcggcgaatcacaatcttggaagtgtcgccccatgcttgaagcggcccttccagacgtaggaagatggtattaagggcagcgatcatagtcacgactcctttgcagcggactctccaggatctttcacgtcggcccatttgaaaccgagatcaagggcctcgatcactgcttcaaccaggccttccggctttccatcttcgccgccgaggccacgcaaacactttgttgcgaactgaacagccggtttgtcctttttggtttcttcgccattctcatctcgcactttcgccttgcgaccgtcagcttcacgttcccagccctgaagcggatagcggtaaagaggcaaagcatgccagaaaagagtcgactcgatgccgtaggcattgcgcacgttgtagacatggtcgccaaactgggcgatacttcgccccaccagactctcgcaatcggcgttgtcgtccggcggatcgccgatcttgcctgcggggtccgcgaaggcgttggcataactcgtgggaatctttccgttcttcttgatttccaccaagatgccgcacggttcgcaatgggaggcaaagctgttttgtttaccgctaggcgtggtacgagcagcagcacgcaagaagtggcctagcgtgcaagcggcgagcttcaccgcattcggcttgagtttgtcagcccagttcttgtgctcttcctcccagttctttatttcctgactatcgtccttcttgtcttcaggcttcttcggctctggcgcaaggttgtacaccaactggtcccaatcgagagagaaatacttgtaaaagcacgcagagttgtacatggcctcatccacgtggccagccctgccgccagccctggctcggtcgtccaccgcagtgaaatagtccacctcattgaccgctgcatgcgtggagatcgcatgcgccacctgcagggcggctttgacatcctcaaaaaactccgatgtcgtcatgcggccaaagagagcaatgtcagcgcaattgtgctgcaggtcggcccacagtttcttctcagcgtctttgtatcctgggggcggtttaggagcgtcatcctttagttgcttcttttccggatcagtctgttttctgatgatattcttgaacttgtcatccggtagactctcaagagtagtcacgatgatcttggcactctctgcgtcgagcgcatatgtcgactgttgagccaccgcttcaggctgctctgcgtcggattcgagttcctccattcggcagttcaagatcagccaagccttgtctaagatggactttcgttggttctcgttgaattgcgaatcctcgagttctgcttccaccaactgtctgaagctcacagccggattcaagaaatagcgaaacgaatcctcgtcagactctctaaggctgaccagacgttcagcaagttccccagcaagtccaggatgtatgcgaattagttgtggggtctgtctgcgggggtcgagtcgcctcttcttcttacctgcacctaacttctcctcagacttggcgatgctttgcagtttgatcccgactcctcgaatttcattttcgtccacctttagcttttgcagtcccttttcaaccagccaaggcaggaattttgtcagtaatccgatatggccctccatcgatttcgcgaacattcctggctcccgattgtgctcgtcgtccgggttgcccggattccggatactgcgtttgaggcactggctggagatgcgagcccttgtgaccccgccaaagacgcatgtcttgggagctcccaagtcgtcacggttcaggtttgacgggctgtgattttggatcatgtggatttcaatcagcatggttaacactcctttcggattgatgaacagtttctaggtactgttccgcccagatatcgcggacgtctcgctcgcgacggtgctcttccccgcggtcccaaatggacaaattgtcgagcaactcgacccagtccaagccagagcattttcctttctctactgcttcggccacgacggacagagcccagcacaggtgcggctccagcgcggcgagcggtgagcacagcagactatcgaatcgcgtccggaatcgggggcggccgtgctcatcgcggggctcacacgtgcccaggactcgcgggagggtgggccgggcgaccggatcggctggacgcacgtgacgcattggaaacgctccgtacaacttggctatcatccaacttgtttcgcgccgcggcgctccggcgcttttgtcccggagagtccaccagagtccagtgaacaggtcgaacccctccagcttctcgtccaacggtttgcccgccagtcggcgcagccgcgagcgctcgccttccttcagcgattcgagccgtcgaatgaattgctcagtctgagtcgagccagccccatcttccttggggcttttgggcttcttcttgttctctggctctggctccttctggtcggtcttgcctaatttggctatctccacagtcagtgcttgccgagcccgttcagttgcttcgcgcctgcgcaggggcgagccgaaggttgtgctcaaaacggccgcatccagcactgcatcccagccgatcgttggacgcgtgggtggtactgcgccattggaatgagcgagatcctgcttgacagtggtgaacatagccagttccagcgcgggtaggctatcagcgagggaactgcggagggggtgaagcttttgcccgtcgtgggcggctaaagatttgagcaagcttgcatctctcagtttgcctacagccttggtccaggctttggtttgaggatctagaattttggccacagcattgttgagattggtggtcctgtccgcaaatttacctccgccctcagcagttaagaactgggtgggaatcgaaaagctcctttcccaacattccacgctcttgtccttcctcgtcgccaagccgacgactcttagtcgcaacgagttcttaccagagcgacgtgccgcctcgattattgcggcgggggctctattgccctctgtgtcgctttggatcacgcctttcaaccagttgcgccattcgccagaggctcccaatgggttcttctctgtatccacggggccaaggttcttctgatcgtcgggataagcaaggtgagggtcgcgccacctccgcagttcattcaattcacttcgcccgttcggtgtgtttaactcgtacaggcatgtgaccaaattggtggttgatttgccgcacactacgcaatggcccgaccgcatagacctatcgtcaatcctgaactgccgtggagtccaggtgaa

SEQ ID NO: 863 - DNA, 4297 bp, Artificial Sequence
  Synthetic Oligonucleotide
aagttcacgttccaggatggcgtttccatatctttgccggaagcctctgacgatgtcaaacgccgagccaatctgtctgccgactgcggcggcgagttgcgagacctgcttaagcaggtgacgcaaaatcccctccggcagcaccccgaaattggcgcatccgtcaagcttctgacgccaaatgccgaggctcagattcgtgaccggctgagccggaccaatgcctcgccgggcgataatgcaaccaaagacaaggcattcctgcgtgaagtctatgcgccggtggtggagcaggttatcgcttctgtaacacctggctccccgctccgtcggcgtgccgcgcgtaatcacacccaagccctgctgaacaaaaagatcaaagagctggtggacaatccggatcatctgtcggaagcaggtatgcatgcagcagtgccttgcaaagcgaaacgcggccgcaagaagggaggatcaaaatgagccagaccgctgaatacatcaagaggctttcagatatgcaagaaggggaactctcggtgctgcgccgtctggccggacggacgctcgatgccacgcttcagggttttgacctcttcacgggtctttggtggccattacgggcgaaaagtcagaactgcccgcgccgggagccgtcatggctcgttgctaagcttttcggggccttccgcattccgcatatccggcccgattcaggcgctggtccccttttgcccgaggtcctgggccgctgcgaaccgaatggcaaggctgacatagagtgtttccgaacacgattcgacagtctgctttgttcatccttgtcgtctctggagccgcatttgcggtgggcgctgggagagatcgcacgggccgtcgccgggcatgtgcctcatgcgcgggatgtgaagggcatcgactgggcgcaactcctcgatgatctctctatctggggccggggtgaggagcaccgccgcggacgcgatgttcgcgacatctgggccgaaacgtatcttaacgctactaacttccatgcccatgtagggcacaacgaaagatgaaaatggtcaataggttggaagtattttcatataaattcaaaagagaggagagcatagaaatgttgatcgaaatccacatgatccagaatcacagcccggcaaacctgaaccgggacgatcttggtgtgcccaagacctgcatcttcggtggcgtaacccgggcgcgcatctccagccagtgtctcaaacgcagtatccgccgcagcccggagtttgcggccgctttggacagggaaggtggtatccgcacgcgccgattggcgaatgtgctggcccgtgtcgcctatgctggagacttcgacatgactcccgaaaagttgaccaatcttctccaagcacaacccgtcgagaacgaagagatcaacagactcgatgccattgcttcggacgccttgcaactgggcggggtgaaggcgaaaagcaagaagaagagcaaaagcgacgaagagaatgaaggcaacggtgatgatacgagcgccgaggcacattccaagatgcttctcttcctctctacgaacacaatcgggaagatggcaaaagacctgaaggacaaaccgacggcaaaggggcttgccgagaaattcaagaaatacattgccgaaaaccccgccgcccccgacatcgccctgaatgggcgcatgactgaggttgcaaagaaaagtgtcttcagtgatttgaactttacggtcgaggctgcgctctccgctgcccacgccatttcaactcacgcggtcataaacgaggtagactatttcaccgctgccgacgaccttcccggacctgatgcaggtgcggctcatgtcaacgagactatgttcaactccgcctgcttctacaaacattttataattgattttaaacagttgaagaagaatttgagaaatgatggagaacttgcacgcaagacggtgcaatgtttccttgaagcagccgccaaagccaatccctcaggcaaacagcacgcatttgcggcattcaatttacccgacggagttctggtcgaggtcaaaaccaagtcagccactccggtcagctatgccaacgcctttgccgatccggtaccggaaagagccgaacgcgctttgatcggtgaaagcattgccagacttggtcagtatgtccacgacatcattacgggttacggcatcgaggctgaccgtttctggttctctcctaacctgcttcaccccctgacttggattgacaaaagcagaaaggaacacgagcaagaacaatccgtcgtcggtaccaatgagttcggccagttcggcatgtttgtccagagggtcatggagaaggtcgtatcagccgaaaagtcggcggaggacgcggaatgaaagaagccaaaacactcttccttcgtcttgaaggactccttcaggcctggggcgacacctccaagttcgtcctccggcggaccatggaggcgccgaccaaatccggcgtgctgggccttatctgctgcgccatgggcctgtcgcgtcaggcggcccgggaacgcctgccggagctcaatacacttgcgatgggtgtgcgaatagatcggcccggcatacgttggtgggactaccacacggtaggagcagaagtcggcctggcaaccgccgggggcaatgttaaaaccggtgctcagggcacgctcatcacgcgtcgagaatacctgaccgacgccagttttttagtggcgcttcaaggtgatccggacctgatctctgatgtcacagaggcgattgaatctccgaagcggcctgtctttcttggccgcaggtcctgtccgccgtcggtgccgatactcgaaagacccggtgagggcgaagggtggaaaaatcctgacgactacggcgacctgacctccgcgctgaactccgtcccgtggcatccgcgttgcgccgatgataaaacgccgcagaaagggacggtccaaactattttggaatggcggccagcctcggaaggagacatcgcctctgaagaggcggaagtatggtacgacgtggcggtttgcttcgacccgccggtccacatgccccggtttgtcctacggagcagtgtctcgccagtagtcggcaaagcgttgcaggaatttccccatgcaccgccgcggccacgcgcagactataggaactctgaatatcgccagcgccgcgaagagcgattaaggaaggactccggggtgtgcgtcttctgtaagtcgcccggtcctcgcatgaccgtccaacatgtgacataccgaagggcagggggaaacgaaacccttgaggatcttcggtctctttgcggtctatgccatgatgccgtcaccatgctcgaatatggaatgaatatggggctggaccgcatcaacccagaggacattcgctggcgggatctgataatccaaaagcgggccgatataatcaaattccggtcgcttgcagccagacgccgttatctttctgccgaggaggtggaatgatgtactgttcgagactgctcattgatacaggcacaaaccccgaccgtccgcggcccggtcgattgtggttgaggaaccgctatcacgtccaccagcggctttgtatggcctttccatccacatcacgaaaggccgaagatccggacttcctcaaaccattcaattcggctgcgtttggtaacggtcaagtccacgtgaagcgcgccatggatgtaggatttcttttccgcattgaccctcttcccaacggccgggcgttgatcatagtgcagtctgctctaacgcccgactggggctatgcttttcacaatgcgagccatcttctggcagcccccccagaggtggaaccattcgagccgaatttttcgaagggtcagttccttcgcttccgtctgtcggcaaatccgaccagacgtttgagcaagcattcacccgatgcaaaagacaactctatcgggaagcgcgttcctgttccggccgacaaacttattgactggcttgtccgtcaggcgggctcggcaggattcctagtaaggcgggacgttacaacttttacgccagggtatgtctatattagcaaaaatggcaagggccagcgtctattctcggttctttacaacggcctccttcaggtcattgacccagatgcctttcggcagacatttgtcagcggtatcggttcaggtaaagccttcggtttcgggctcctttcggttgcaccgggtaatagtgaaggcttaggacacacagtatgagagttcaggacttgcacgttttgcccaag

SEQ ID NO: 864 - DNA, 4265 bp, Artificial Sequence
  Synthetic Oligonucleotide
cggttggtgcgagccacacgatgagcacgctcgcccccgcttccgggggcgattcgatgcgcttctgtgctcgccgctttccgccctggagccgcacctgcgctgggccctgcccgttgtcgccgatgcggtgactgcacgccgggcaaccggcctcgattgggtgcaattgctggacgatctgtcaatttgggaccgcggcgaagagcatcgtcgcggcatagacgtccgtcaagattgggctcgccaatacctggaagccgcaaagtgaaagggggagttgaccatgctgattgaaatccacatcatccagaaccacagtccgtccaatctaaaccgcgacgacctgggcgcgcccaagacgtgcatcttcggcggcgtaatccgcgcccgcatgtccagccagtgccagaaacgcagcatacgcaatcccggtaatcccgatgacgctcacaaccgggagccgggaatgttcgcgcaggcaatgaagggacatataggcaaacggacaaagttctttccctggctggtagagcaagcgctcgcagattcaggaattcctgatggcgagcacgatcgaattgtgctggcggcgcaaagaattgctgtcagcaaggagaaagatgacaagcggacggcagttggggccacaacagacctcaggcgaaagacgcggcaattgatccatctcggaccggaccacgccaagtactttgttgccaaacttgccgaacttcgggacgaggcaagagaccgatatgactacttcctcaaccctgttgtcggctttcaggagatggtgcgtgagcttcttgacgaatcaggcctgaacgagaaggagcgagataagatcgttaaagctagttggacaattgccaagtgccgaatgtctaaactgctccaagctcccgagggggaagagccggaacctgagcctgcgatggaggacgaccaaccaggccctgaacacgcgaaacttctcgctgaacgcctctccgaactccgtatttccgatccgaaccggttcaaggacctgacgaaggccactaccacagacgagaagagccggcttaaggaggatgctcctgaaaagccaaagaaaatggacgagttcatggaagccctcaaaacggtcaatcgttgtgatgccgttgacatcgccctcttcggtcgcatgaccacatcggatgccttcgaagacgtggaagccgccatgcaggtggcacacgccatctctacccacgccgtcgttaatgaggtggactacttcacagctgtggacgatttgggcaagaccggtggtggagcgggccacgtggatgaggcgcagttcaactccgcatgtttctataagtacttttgcctcgactgggatcaactcgtgcataatctcgcgcccgaaccacaaaagccgaaagacaagaaggatgacagctcggaagtgacgaagtggaagaagcaccacagcgactgggccaataaagtgaagcctgatgctgaacgacttgccgcttgtactctcggccactttatccgcgccgccgctctgaccacacccagcgggaagcagaacagcttcgcctccaattgcgagccgtgcggtattcttgtcgagatcaagaagaacgagaagacgccttcgagctacgccaatgcattcgctgaaccggctcgcaagatcggtaacccgccgaatgacgcggccgactgcgtcagcctcgtcgggcggagtatcgcccagctcggcgaccacgtctaccaacttcggaaagcctaccaaacagattccacgttgctatggtatgccctgccgctgtggcgctacccgcttcaaggctgggaacgcgaaaccgacgggagcaaagccaaagtccgaaacgagaagggtgagccgacgaaagactacaaacctgctgttcaattcgcctcaagctgcctcgatgtcctaggcggacgcgatacagagcagcccggcttagttgaagcggtgatcgacgcactgaagctcaacctgaaatgggccgaagtgaaggacctcggcgaggtaaaggggggctgacaatgagtgaagcgcccaacacagtcttccttcgcctggaaggtccgcttcaagcatggggagacaactccaagttcgtgattcgccggacgatggaggcgccaacaaaatccggggtcatcggcctgatctgctgtgcgaggggactgtcgcggcaggaggcccgaaagcatctaccagatttgaacgacttggcgatgggagttcgcatagaccgggcgggcactcgctggtgggattatcacaccgtcggggccggctacggcatcttgacagcgcaaggcatagtcaagaagacggcaagcacgggagattacgaaacactcatcagccggagggagtacctatgtgatgcaagctttctcgtagcacttcaaggtgacgcttcgcttattcagaaagtggtcggtgcgctgattagtccgaaatggccgttattcctgggccgcaagagttgtccgccttccgtgcctgtgatggccctgcctggaccgaatgagtcatggaccaatcctatgcgcgccaagaacggcctccttgaggccctgcagggcattccgtggcgaccccggtacaagattaacgcaccacaagaagacagcaaaccacgcaaatccatcaaattggattccctgatcgaatggcagcctcgtaatggcacgatcgcgcctgccgacgcagagatttggtacgatgcaccggtatcgttcgatccgccggtacaggagcctcggctggtgcagcgatgtcctggcattgaagtaccagtcggtcagccagtccagcatcacacgccgcctccgcctcgcccgcgggccgattataagaacacagagttcaggaaacgccgcgaagatcggctgaattccgattacgggctctgcgtcttttgcaaggctcccgcgacgaccgtgcagcacatcacgtaccgtcgggctggaggcaacgaagaaccggacgatctagcctcgctgtgccggctctgccacgacgcggtgactatgatcgagtacggcctcggtatgggcctggaccggattaatcccgaagagccgcgttggcgtgatcacataatcgcgaaacgggacgaaatccgcaaatggcgcagcgaggaaggacgccgccgcgccctgcgcaagtcccctgcgaacgtccgccgcgaactcctcgaagaggaggtgtgagccatgtaccattctcacctactcatcaacgtcggtgacaatcccgatcagccggactggaacctctgccgccgctggcttcgtaatctgtaccgtgtgcatcagcgcctctgcatggcgtttccgtcagtgctgcctgccgagcacgagcgccaagcagcgtactgccggccgttcaatactgtggactgtccacagcagcatgagttgcctaccgcaaccaacggcggcgatgtgcatctggcacgaagcaggggcaacggttttctttttcgcatcgattacccggtcgatcccaagcaaggaggacgtagaccggttatcatcgtccagtcggctaccaaacccgattgggagtacgccttcggcttgaccaaagacgcgatggatgaccgcgggcaccctatcggaaacgccgattttcttctcagcgctccgccgcaggctaagccggtctccatcgatcttgacggcaagtctctcgttctctccagtgataagcaggactaccacctacgtcctggcaatttggtgcgcttccgactcagggctaacccgacgcggaagattcaggatagttctcccaacgggaaacgcaaacgggtgaatccaaccccgaaggatcacgccgattggctggcccacaaactcgaagaagctattgatggcccgttttgtttcgaagacttcgtccccggctgggcgtacggctggcgcacgaagtacgaaccgcagcccggccaacgcatgcagtggtggtctgtgctgtttgaggggacctttcgtctgaaggacccagtcgtgctcaagcagcttctcgaatccggcatcgggcccggcaaagctttcggtttcggccttctctccatagcgcctgtcaatccctgactccgggagcggcgacatgagaattcaagatctgcacgtactgccgaagttccgtgacgggtggagttacctatatgtcgaacactgccggatcgaccaggaagctcaagccgtcgcgatccacgacgccgcag

SEQ ID NO: 865 - DNA, 4260 bp, Artificial Sequence
  Synthetic Oligonucleotide
  misc_feature (585)..(622): n is a, c, g, or t
  misc_feature (1674)..(1689): n is a, c, g, or t
cccccacgtgcgtggggacgctaaaggctggccggctctttgaggttaccatcacggttcacccccacgtgcgtggggacgctgggatcctttacaacatggtgaagcggccgatgcggttcacccccacgtgcgtggggacgctgactcattcagactcgagaccatcagccgttccggttcacccccacgtgcgtggggacgcttcggcgtcatccgcatggacaccaacttctcgccggttcacccccacgtgcgtggggacgcttggaatatctgcagatccttcctggccggcggcggttcacccccacgtgcgtggggacgctgttctcgtggacggcccgcaggcgttgcgtcagaggttcacccccacgtgcgtggggacgcttgtgatctggcgaacacgagtgcgtctccggccggttcacccccacgtgcgtggggacgctttttttggctcccgctctcagccattcaggctcggttcacccccacgtgcgtggggacgctaccagatcgaagtggcacaggctcacgatgttcggttcacccccacgtgcgtggggacgctagtttgcccgnnnnnnnnnnnnnnnnnnnnnnnnnnnnnnnnnnnnnngcgtggggacgctttggcccgagggggagcagcttctgctgcgctacggttcacccccacgtgcgtggggacgctcacgggcttgtccacgcccattcgcccgcgccgggttcacccccacgtgcgtggggacgctgcgggtggtttaatgcgactcaaagcgcccgccggttcacccccacgtgcgtggggacgctactgaataaacctgaatttacggcaccctgacgagaaatagcccctcgaagtcttcgaccgaccgcgccgattttccccaactccgaatccgaaaaccctgctcattgtcgctcgaatacatcatcacacaaccgcccctcctggcattcccgcaggctttttcccagagtttatcgcgcaccatggctgaaaccctccccacaaaaactcctgtcttcggttccagaaaccaccgtgtcaattcaccccgtaacccaggcggcacacgctcaagaatcagaaccaccatcgttggcctccgtttcatcagtttccaacggataggtgcacccgccctctacttctcccgtcaaggggtcccacaaagcgcctggggcggcggcgtcctggccgaatgggtcatcacttgtcgcgcctttctttggcaacatcagcgctttttggatgtcaggaatgatcctctccagaagccttgttgacacaaacaggtcacggcacgagatgcgcacatgtcgttccagcctggcctgctcttgcgctgctgcgcgaaatgccgctgggatagaaatttccgccttgtaaagatcggcgacatcataaacgaaggacagcattttgccggtatggatgaagccgagcgcgggcgagaatcccgccgaagtaacagccgcatggcaaatgccgtaaagacacgaattggccgccgacaaggccctgttcaccgggtccgcatgggcccacttgtcacgccggtagctgcggcccgcccaaggcacgccggtttccctggcggcccgggcataggcatcccggacacggacgccttccattccgcggatctggcgcagggtcannnnnnnnnnnnnnnnctcggcaaaccgcaactggtacaaacggtgcaccaccttcaaacgaagatccgcatccgcccaagcccgcgcctgatgcaggaagttcgccgcgctccgcgtctcgcccatgcccgccgcatagaaccggactccctcttcgccgcaccagatgaccaggcaaccatggtccgccaacacggaaatggcggcatgcgtaatcgatacgcccggccccagcatgagcagcgccagattcgcacaggggacaggcaccttgccggatgcatcgtggatggcaatggcccggacttcctggtcgacgcggcaatgctcgacgtagagatagctccagccgtccctgaacttgggcagaatctgcaggtcccggactctcatgtcgcctcgtccgagcccgcagtattggccggcgcgatcgaaagcaggccgaacccgaaggatttgccggaaccgatgccgcggataagggtctgccgaaaggcatccgggtccgtgacctggaggaggccttcgaaaagaaccgaacgcagacgctgccccttgccgtttttgttcatatagacgaaccccggctgaagggtcgtggcgtcttcctcgatatggaatcctgccgattcggcccggcgggcaagccagtcgacaagccggttggtcggaacgggaacgcgctttccgatagattcttcttttgcatccggtgaatgcttgcacagacgtctggtcggatttgccgcgaggcggaaccgaaggcaccggccttccgagaagcgtgggtcgaatggtttcacctcagggggcgctgccagcagataatccgcattgtgaaaggcatagcaccagtcgggctctatggcagactgcacgatgattaccgccctgccgccgcggagaggttcgatgaggaaaagaaatcccgagcccacggcacgcttcacatggacttggcctttaccaaactcatccggtttgaacggttggaggaagtccctatcttcggccttccgggacgcggacggaaaggccatacaaaggcgctggtggacatgatagcggttcctcagccacgaccgcccgggccgaggccggtcggggttgccgcctacgtcgatcaatagacaggaccggtacatggctattccacctcctcggcggcaagacgccgacggcgggtctccagcgagcgaaattcaacgatctcggcccgcttttgaatgatcggcttgcgccagcggggctcctcaggattgatgcggtccagccccatgccgaggccgtattcgagcatggtgacggcgtcatggcacaggcggcaaagcgaacgcaggtcctccagggtttcgtctccgccggcccttcggtaggtgatgtgctggacggtgtttgccggggctttacagaagacacagaggccgtggtcacgctgaaggcggcgcggcctcatgcctttgggaaccttgcgagacggatcggcggggtcggcaatcagggtctcgcttttccattcagcgttgttgtagttcgcgtgcggacgggggggacgcggcacacgctcttgcgtggcaccgtcggtggacacaccgttcgctccgctggtgagttcggtgcgcgtgactaaacgcggatgatgtaccggaggatcgaacgcgacgggcgcgtcgtaccagacttcggcatcattgggggcttccggctcggtgtccgtcgcccgccattcgaggatacaggcgagcttatcaggcttcttgtcaggctcaaagttgggcaggcgcggttgccagggaacacacttgagggcatcaagcagggacctgcccgtttcgatatgcggctcgcaggtgccgtcctcgcgctttcgcgtcacgaggatcggcacgctcggcgggcaggacttgcggccgaggaaaaccggccacttcggcgacgcaatcgccgcggcaaggtcatggatcaacttcgcatcaccctggagcgccacgagaaagctcgcgtcggccaggtactcccggcgcgtgatgagcgtgccctgggcgccggtcttcacttcgttcccagcggttgtcatgccgattcccgctcctaccgtctgataatcccaccaccgtgtgccgtgccggtcgatgcgcacacccatcgcaagcccgttcaactccggcaggcgttcccgcgccttctcacgcgacaggcccatggcgcagcagagcaggcccagcaccccggacttggtcggggcatccatggtccgccggatgacgaacttcgacgtgtcgccccaggcctggagggggccttccaggcggaggaagattgtgttggcgtcggtcatttcgccgcctccgcaggcgccccggttgccccgagcttgtccatgaccttatggatgaactgatcgaactcgccgaactcgtcggaaccgaccacggattgttcttgctcgtgttccttctggcttttgtcgatccaggtcaggcgatggcgcagattcggcgagaaccagaaacgatcggcctcgatgccgtaaggcagtgtaaataaataaaggtatcaatgtgcctatcgcgattggggtcggat

SEQ ID NO: 866 - DNA, 4235 bp, Artificial Sequence
  Synthetic Oligonucleotide
taccccctccagggctgggagcgcgacgcagacggccagaggaagaaagaaaacggcaatcccgtacctatcgcaaacaaatgtttccccacccttgacggtctggtggagggcgttcttcgcgagattggctttgactggtccgaggtcagggaccccggcaaatttcagcccgaagagacgtgaaatgagcgctctggcgaacaacacggtattactgcggttggagggtccgcttcaggcgtggggtgacaactccaagttcgtcatccgccgaacagccgaagcaccgacgaagtccggcgtgatcgggttgatctgctgcgcgatgggactttcgcgcaaagaggcgcgcaatcggctggaagagttcaaccagcttcgcatgggcgttcggatcgaccggcccggcgtacgctggtgggactatcacaccgttggcgccggttacggcgtgttaaaggccgagggcgggatcaaaaaaacagcgaccacagaacaaatcgaaaccctcgaaagccggcgtgagtacctttgcgatgcgagctttctcgtggcgcttcagggcgatgctaagctgatcggatgcattcgcgatgccttgaagaatccgaagtggccgctcttcctgggccgcaagtcgtgtccgccaagtatgcctgtacttgagatgacccgtgagggtgagaccggcgatccaacaacccaagaggatttgcttgccgcactgcgagccgtgcgctggcatccgcgcctcaaggaaatcgacggggagccaccgcgggacggactgacctgcctcatcgagtggcggccatccgaggaagaatccacggcgcccgccggagccgaggtctggtacgacgcgccggtatcgttcgacccgccggtacatgaagcgcgactggtcatacgtacgagcatagcggtcggtgttggcgaggctacgcagcacctcttgccgcctccgcctcggccgcgcgcggattatcagaatagcgagttccgggcggttcgcgaaaaaagactcacagcggacaagaacctttgtgttttctgtaagtccccagccacgaccgtgcagcacgtcacatatcgccgtgccgggggcggcgaagccttggaggacctgcgctcattgtgccgtctctgccacgacgcggtgaccatgatcgagtatgggctgggcatgggcctggaccgcatcaatcccgaggacccgcgctggcgcgacaagatcattgagaagcgcggcgaaatcatccgctttcgctcgctagagacccgccgccggcgcctcgatgccgaggaggtggaatagacatgtacctatcctgcctgttgatcgacgtgggtaacgacccggaccggccacggcccggccggcattggctgcacaaccgctaccaagtccatcagcgcttgtgcatggcgtttccgtcggcgtccaagaggtctgatgatcccgagtttctcaagcccttcaacgctaatgactttcctgaggcccatgccagcgagccgcggcaggtccatatttcccggcgaccggacgccggtttcctgttccgcgtagatccacaacccggcggccgcgtcgttattgtcgtagcgtcagcgatgaatcccgactgggactatgccttccacaacgccaattatcttttggcggcttgtccggaggtgaagccgttcgatccgcgcttcgcaaaagaacagactctcagatttcgcctcgtggcgaatccgacgcgcaagattgacacgaagagcgcgcccgacggccgccgccgccatggaaagcgcgtcccagtgccggccgacaggctgtacgattggctcgctcgcaaggccgagctcgccggattttcgatcgacagggaatccatcaccgttcagccgggctatgtttacataaagaaggaccgcgatggcgagggacaaaggctattcgccgcccggtacgacgggatcctcaaggtcagcgaccccgcaaagttccaagaagccatcgtcagaggtatcggccccggcaaagcctttggcttcggtctgctatcggtcgctcccgccgcgacctaattccgacatcgttccccggggtgagacggaaccctcgccgaacttcatctcatccaccggcgcaggcagtttcttccgcttggcacaattcccgccaaggagcaggatcatccgtggtaaacaaggggggcggccgatgaacaaccttcgggtcctgccgaaagtccgcgacagcctgagctacctgtacgtcgagcattgccgggttgaccaggaggccaaggcgatcgcgatccacgaccagcagggcaaattcccggttccatgctcgtcgctgacgctgctgatgctcgggccgggaaccacgattactcatgccgcgatccgggcgcttgccgacaacggatgcctggtcgcatggaccggtgaggaaggtgtcaggatgtatgctgcgggacagggcgagacccgtttcgcccgaaacatcctgcgccaggcctggctatgctcgcatcgtgcgctcaggcttggcgtggtgatgaaactctaccggatgcgcttcgacgaggcgctggacgattcgctttcgcttgagcagatgcgtggcattgagggcgtccgcgtgcgccaggcttacgcgcgagccagcgcggaaacgggggtgccatggttcggccgctcttacaagcgcgaccagtggagccaggccgacccggtcaaccgcgcactgtcggcggccaacagttgcctctatgggatctgccatgccgcgatcatatcggccggatactcgcccgctctcggcttcattcacaccggcaagatgctttcgttcgtgtatgacgtggccgatctctacaagaccgaagtcaccattccggtcgcctttcacgtcgtcgccgaaggggtcgaaaacctggagtcgagagtgcgccgcgcctgccgcgattcgtttcgcgccgcgcgtctgctccagcgaatcgtgcccgacatcgaacgcgcccttggtgcccccgacatgaccgccgattacgacttcgacagcgacccggccgcgccgggatcgctgtgggacgatcgcaagggcgaggttccgggcggagtgaatcgcggcgagccggatgaggcggtcgccactgcgtcggcggagttgtcccacgcgcgtgggggtgaaccggcgtgccagatcgggtgccggtcgtcggtggcgttgtccccacgcgcgtgggggtgaaccgctctcaccttgtagaagcgcgtccgggtgagcgttgtccccacgcgcgtgggggtgaaccgaagcggaaagcgagtcgggaagcgcagcgtcagttgtccccacgcgcgtgggggtgaaccgaaagtacgctatgggcagcaaaagaacgaaaagttgtccccacgcgcgtgggggtgaaccggaattccatgattggtttcttgacgggttgcagttgtccccacgcgcgtgggggtgaaccgcaaacctttgtgcgcgtgcaacggactcgcgagttgtccccacgcgcgtgggggtgaaccggtcggggaacgcaaacagctcatactcctccagttgtccccacgcgcgtgggggtgaaccggtcgagctagacgcaatgccacgatgcgaagtcgttgtccccacgcgcgtgggggtgaaccgcaatgactttttctcggtatggctgaacgttggttgtccccacgcgcgtgggggtgaaccgtcgctaacgtcgacgcttcggattggcgatttgttgtccccacgcgcgtgggggtgaaccggaaggtacgtgccatggaaagcaaatatgaaagttgtccccacgcgcgtgggggtgaaccgccatatcgttgatggcgctctgccaatcggctgttgtccccacgcgcgtgggggtgaaccgcaagccaaacattgatgagccgtccgacttccgttgtccccacgcgcgtgggggtgaaccgccatcccaaatctgcggcacgtctcggagtaagttgtccccacgcgtgggggtgaacccgcaacctcaccaccttcgatgaccggccgcgcgttgtccccacgcgggtgcgccaacgatcgagcaatgcggggggtatttacgtcgatgaaactggctggcggagagggggggatttgaacccccggtcccacgaggggacacgtgatttcgagtcacgccggttaaaccagactcccgaac

SEQ ID NO: 867 - DNA, 4178 bp, Artificial Sequence
  Synthetic Oligonucleotide
cccgcggaagccgatgaagatcaggatgagcagcaggcggctgatacatctgacatgctggtttttaccacttatgatgccctgcgccaaatggcaaagctgctttccgactccaaactaagtgaaagcgaaaaactgctgcagttcaaagatctgctcacaaactgcgtccattctccggatatagcactttgcggcaggatgctggagaccaaagagcttaaaaacactggcgttgaaggcgccctacaggttgcacatgcgatctccacccacattgccagacctgagatagactattttgtggcggccgatgatgttcccggtgaagacgccggagcgggtcatattggcgaatccatgtttgcctcagcctgtttctacaaatacttctccattgattgggaacagttggtcaagaacctgaaaggggacacgaatctggcagcccacaccgtgggtgcctttctcctcgccgctgccaaaaccaaccccagtggcaaacagaacagcttcgccgctcataactatcccgatggcatccttgttgagttcaagaattcccctattagctacgccaacgcattcgtcaggccagtttccgtggtcaaggaatcggacctggtggaacaaagcatcggccagctttccaactacgtgaacgacatcaggcttggctattatgatgagcaatccccagttatcagcttctggttttctccaaacaatcgctattcccttggcaatgagcattccaaactggcttccagaaacattggcaacctcaatgagcttgtaggcgctgtgttggattatattggcggcttcaagtgggaagaagttcagaaaagcaaggcttatgttggcggctgacatgagtgcgccacccaacaccttattcttgcgcttggagggggctttgcagtcttggggcagcaacgaggctaagtttgctttgcgcaggactaccgacgctcccacaaaatcaggtgtcctggggctgctttgcgcggccatgggaattgggcgcgcggaggctgctgattcatggctcccaaaactcgccaacctgcgcatgggcgtgcggatagaccgccccggcatacgctggtgggacttccatactgttggagcgggacaaagaatgcgcatggcagagctgaaggcacccaaaaaaccttccatggttggagctgccctggctgataccctgacaccaagcaaagtaaaaaccagggcagagaccttgctctcacgccgcgaatatcttgccgacgccagttttctggtcgccttgcagggtgagccggaacttgtggaaaagctctccgccgctctggccaagccggtctgggcaatttatctggggcgcaaatcctgtcccccttcacgtcccgtgggcgagcatgctccgggcttttataacactttggaggaggcgctgtccgcggttcccctgcaaaagcgctggcacaatgaacccctgccgcaaatactgccttgcgtcatggactggatccccagccaggacggagaacatgcgcctgatgacgcggagattcattacgatctgccggtttcttttcagccgccccgccatttgccgcgcttcgtgatcaggcgtgagctggttgtgggagaggatgtgcaagtgagcagggaaaccggaaccagcgtttggaggcccaaaggaacccgggcggattataacaattccgagtataagaaggtcagggcggagcggcttgtgatggaccatgccgcgtgcatggtatgcaaagctcccgccacgactgttcaacacgtgaattaccgcagggcgggaggcaaggaaataccggaagacctgcgggcgctgtgccgcctctgccacgacgcctgcaccatgctggaatacggttccggcatgaccaccgaccgcatcgacccctgcgaccccatctggcgggagcgaatactggcaaagcgcaaagatatagtcgagttccgttcgcgcgggcagcgtttccgcaaaatgaagccagaggaggaaaacggatgatctacttgtccaagctattgatcgatactggaggcaatccagaccgtccccgccccggcagaaagtggctggacaatatctataacgtccaccgccgcctttccatggcgttcccttcaggtttgcgccgggagcaggatccgcatttcctgaagcccttttcgccaaacgacttccaaaaaactcccttccttttccgggtcgataacaacatcgacggaaacgataaaagggcgattattatcgtccagtccgttcttgagccggattgggattattgcttccaaaacgcgcttgatttcctggcagcgccaccggaaacaaaggagtataatccagagtttcaagcgggacaactgctccggttcaggctgcgggtaaacgccagcgtacgccgtcatattcctgagaaggtgcaacaggacggtcaaaccatagaaactggcaacatcctgcacaaaagggtttctctcacctgggatccctcttccaccccggatcaggcccttgccgactggctggctgccaaaagcccaaagctgggcttcacccttcagcgctgtgagcttcttcaactgggttgggtttatggctccaagcctgaacctaaaaatgtcaaagcaaaggaacagggacagggctactggcgtgaacacacatacaatcctctgcgcttccgttcggctctactggagggaattctcaaagtggatgacccgaaactgttcctggaaacgcttagaagcggcattggaaaagcgaaaagcttcggctttggcctgctgtccgttctgccaatcaggaatgatgaataaagacctgcactctatcccccggatcagagatcggcttagctatctctatgtggagcatgccaaaattgatcagaacgggcaagccatcgccattcacgatgccctgggagaaaccccggttccttgtgccggcttggctatgctgatgctgggaccgggcataaccatcacccatgcggcaatactttcactggctgcctgtggctgtctggtagcctgggtgggggaacatggcgtcaggttctatgccgcaggcacaggtacaacccgtagcgccgtcaatcttatgaaacaggcaaagtactgggcagacccggttttgcatttacgggttgtgcgctccatgtatcagttgaggttccaggatgagctttctcctgatttaactttgaaccagatcaggggcaaggaaggtgcccgggtgcgcgatacatatttccaactctcccaaaagtatggtgtgcccatgcagggcagaaactatcaaagagacaactggaacaaagcagaccccataaaccgggctttatctgtggcaaactcatgcctctacggcatatcacacgctgccatcgtagcggcaggattctctcccggattgggctttgtccacactggcaagcaactgtcgtttgtctatgatatcgcggatctatacaaaatggagatggctgctcccgccgcattccgggcgaccgctgaagggatcggcgaactcgaccgcagagtcaggcttgcctgccgtgatgaattccacaggcagaatctactcaaacgcattgtcgctgacattagttctctcttcggtgatattatgccagaggatagcccggatgactgttttgccgaagaaccagccttgcctggaggactctggtctccagatggagaagtgtccccagggggcatatcttacgggcaggatgatctgccaaaggaagattgatggtggttttggttttggaaaacgtgccgaactccttgcggggtcagatcacacgttggctgctggaagtaaaggcgggggtgtttgtgggtaaagtctcagcaatggttagagacaaactgtgggacaaggttagaagcaactgcagcggtgggacttgcctgatgatctggagtagccagaccgaacagggttttgatatcgaattctggggtgccgcatcaagagtcgttacggaatgggagggtatcaaactaatgaccaaacatccttgaactaaggcttgaaggagctcaatgacctgttagctctctattgatcaagtgtattccccacgcatgtgggggtgaaccaggagaattaaaatgaatctcaa

SEQ ID NO: 868 - DNA, 4173 bp, Artificial Sequence
  Synthetic Oligonucleotide
accagcccgttggcgacgccgatgtagattttctttactccgatgtcgagcgaagcttcccgcaggccttcgaccgcgcgaacgtcgtagacctccagcttctcgcaagttttgccggtgagcttttcatacgcggttcgcagtgtagcttccatgacgccgccggtgcagccgaaaatgtcgccagcgccggtggagatacccagcggcgcgtcgaactctttgctcggaagtttgtcggcgtcaaggtcggtttccgtccagtattcgatgccgaagctttttatcatccatataagctctcgcgtggtgagcacggcggcgatgtcgggcagaatccgttccagcagccggctggtccggaagcggtcgcggcacgcaaggcgtacctggcgttccagtgggccgccgccggccgcaacaacgtcgaaggcaagcgggatggtcaagtcggccttgtagaggtcggcgacgtcatagacgaacgagagctgcttgcccgtatggatgaagcccagcgccggcgagtagcccgcggacaggatcgcggcatgaacaacgccgtacaggcaggcgttcgcgcacgacagggcgcggttcaccggatcggtctggttccagtgcttgcggtcgtactgccggccatgccacggaccacctgtgcggcggctcgcaaccgcgtaggcttcccgaacgcggatgccctccatcccccgcaactgctgcacggagaggcgcgggtccagcttgctggggaagcggcggcggtacatccgtcgcacaacggccagacgctggcgtgggttgctgaccagcgcggcctgccggatgacggcggctgcgctgcgcgttccacccgtgctgtgcgcgtacaggcgaacgctctgctcgcctacccaggccagaaggcagttgttgtcggcgagggcgcgcacggcggcgtgcgtgatggtcgtgcccggtccgagtagcagcagggccagcgcggctaccggcaccggcgtggtgccgctctgatcgtgcagggcgatcgccttctcgcactgctcgatcgtcgcatgctcgacgtagaggtaactcaggcggtcatcaaagcgggccaactggtgcaggtcgtccatagcggtcctccggatccacaggcgcaccctattcacatgtcaaagatcacgggcgctccgcgtcgcttacggcgccgtcggcacgttgtctgacttcggcgcgaccggtgccacggacagcaagccgaaaccgaagcccttggccggcccgatgccagcggccagagcgtgctcgaaagcggctggttcggtaacacgcaggatgccctcgtaccgaacggagcgaagccgatgaccaccgcgcgggtcgcgcgtcttgttgacgtagacgtatccgggctcgcagatcggcaactcctcgacctcgaacccattggaggcgctgcggcgatccagccagccgcggagtgcttcgtcactggtacgcacgggaacccgtttgcccgcccagcgcggcgcgaagggttggccggcctggtccacggacgccgaacggacacggaacacggggttggcctgcaggcgaaagcggaaccgcgcgccgggcgcggcggtcagttgcagcggccgcggcgggccgggcggtgccgccagcagatggccggcgttcccgagcgggcgtccggtgcgcggatcgcgtgcgtcgggcagcagaccgaacgcgtagtcccagtctgggacagcagccgagagcaccagcagcgccgcgcgaccgtgcggctgcgggtccacacggaagagaaagcccgactgaccccgtgcgacgtgcacgtgtccgtccccgaagtccgatggcgcgaagggtgcgagattcgctgcgtcgcgctgccgacgctccgacgacgggaacgccatgcacatccgctgatgcacacggtaggcgttgcggagccagaggcgaccgggccggggtcggtccgggtcggcgccgatgtcaaccaacaggcatgacaggtacatggtcactcgtcctccttgccctgcaactgtcggcggcggtgctcgagcgaacgaaagcgcacgatctcgtcgcggcgggccacgatctgggtacgccagcgcggatcgcaagggtcgatgcgatcgagtcccatgcctagcccgtactcgatcatcgtcacggcgtcgtggcagagccggcacagggcgcgcaagtcgtccaggcgttcctggccgccggcccggcggtaggtgacgtgctgaaccgtcccttgacccggccgatcgcagggcgacttgcagaacacgcagaggtggcgatcggcctccaggcgctcgtcccgacgcttgcgatactcgctgttgcggtagtccgcgcgcgggcgggacggcggcggcgcgtcgtgctgtagggcggcgccgaccgcgaccgtgacgtcggcacgcgtcacgagacgtgcggcgtgaacgggcggatcgaaggacacggggttgtcgtaccaagtctccgcggactcgggagccggcgtgtcgccgtccgtgggccactccagcaggcagggcagcgccacggtcgcacacggccgtcccttctcatcccgcggcgcatcagccgcgtaacgcgggcgccatgggtgcgatgcgagtgccgcggccagatcggcgtgcgtcgcgctcgtcgacggcgaactctggccggacgtcgcggcgggcggcgggatgaacaccggcacgctcggcggacacgaccggcgaccgagatacaccggccgggctggacgggcgagtgcggcggcgacctggctgatgatgcccgggtcgccccacagggccacaaggacgctggcgtcggcgaggtactcgcggcggctgactctggtctcgatctcctgcggcttccccgtcctcttcgcctccttgccatcggcaggcatcacgccaacgccggcgccgaccgtgtgccagtcccaccagcgctcgccggggcggtcaacgcggacgcccatgcgaagccgggtcaacgtgccgagcgttccggcggccgcgctgcgtgacaggcccatggcgctgcacaccagtccaagaacgccggacttcgttggggcggccatactgcggcgcatgtcgaaccgagacgggtcgccccaagcctggagcggcccctccagacgcaggaacagcgtgttggcgctcacgacgcagcccccacagcagtccggacaccacggtcgacagccgccaacacgccggtcaccaacgcctccagcgtctcgacgttgccgtcaccgtcgatcacgggcagttcgcggaccgtctcgccggcgctgcggtcagcccaggtcagtgcgtaccggccggccggcgagaaccagaaccgcgtggcggcgatgccatagccgacggcgatctcgtgcacatgctggccgagccgcgcgatgcgcgcgccgatgagcccacgaacagcgcgggggggcacatggtcggcgaacgcattggcatagctgacgggcacggcgcactcggtcttcacctccacgagaacgccggccggcaggttgtaagctgctgagctcttctgcttgcccgatggcgtgctgagcacagcggcctgcagaaactggcgcagcgtcgtgcgggccaggtccacatcggcgaggttcgagacgagctggtcccagtcgatgcagaagtgcttgtagaagcaggcggatgagaacacggcttcgttcacgtggcccgcgccggtaccggtggccaggtcgtccacggcggtgaagtagtccacctcgttgatagcctcgtgcgtcgagatcgcgtgggcggcggccagagctgcctcgacgcggaaggacttgagtttctcgaacggccccttggcgctgaactccgtcatgcgacccgacagggcgatgtcgggtacgcgcggctcctcaccaagcgcagcggcaaactccgcagccagatcgccggacttgtcgcggacggcggctgccatccggtcgatcgcggactgcggcacgaaccagaggatgtcggtggcatcggggtcatcatcgacggtcttggttgtgaggccgccgtcggcgaagaccttgcggatgcgcttcatcacatcctcgggcggacagtcctgaccggacgcccggcggccgatctcgcggatgaggctgcg

SEQ ID NO: 869 - DNA, 4172 bp, Artificial Sequence
  Synthetic Oligonucleotide
ctttcctcttatcccctctccccccaacggggggagagggtcagggtgagggggggcggtaaaaacttttggcaacgagtatatatggaattgctggtaaagtccccctttgaaaaagggggactttccacgcaattccttatagttccccactttgctaaactaacctttacccacaagtcttcttgggaggcgcagccttttttgcctcgttgcctcgttcccaagctcccgcttgggaacgaggcttgattttactcactgccttcacacctttacttgtgggtaaaggtatagtgtttgccaaaagttttttccgatagccgcgcccttcaaatcccccctaacccccctttaaaaaaggggggaactctaaggaatttctgttaaagtccccatttgacaaaggaggatttagggggatttggaaaccggcaaatggaagaaatttttggcaaacgctataaaagaggttgatttcggttcacccccacgtgcgtggggacagcggcataataggcggcattggtggcaaacccgacggttcacccccacgtgcgtggggacagcaggcggctttaatcctgctcatggggtttctccggttcacccccacgtgcgtggggacagccgccgccccctttttgtcgcgtacgcccatggcggttcacccccacgtgcgtggggacagcacttctcaaagccgcgctctacggcacccgaatcagaaaaagaccctcgaagtcttccacctgccgggtcgggtctccgtgcatacggatggcaaacccctgctcccggttagacgtgtggatcatggtgcagccaccgccccgggcttccttgcaaaccttctcccacaggaggtcccgcaccatacccgaaacgctgcctacgaagaccccggccttgggttccagcagccaccgggtcagttctccccggagtcccgccggcacccgctcaagaatcaggaccaccatggtttccctcctcaggctccgggtcgccgaaattttgaccgccggccagactgccggcctccggatcccagaggtccccgggcagggctgcatcgccgtcaaaatcagccccggcggcgattccggtcttgttcttgaggtccagggcgaactccaaatccaggatgatccgcttcaggagtttctgctcattaaaggcatcccggcaggcctggcgcacccgggtctccagctttagttcgccccgggccgtctctccgaaagcaatgggaatagagacccgggtcttgtacagatcggcgacgtcatacacaaaggacagcatcttgccggtgtggataaaccccagggccggagacagacccacggcctggatcccagcctggcagatgccatagagacagctattgcccgcggagagagcccggttcaccgggtcggccgcgtcccaggcgtcccgccggtaggcccgcccctgccaggggacgccggtctcccgggaggcccgggcgtaagcctcccgcacccggaccccttcattgccgcgaatctgctgcagggtgaggttatccggcaggggctccgggaagcgcatgcggtacatccgcacaactacctggaggcgtagttcagggtcagcccagaggcgcgcctggtgcagcaggttgtcggcgttgcgggtcaggccctggccgtgggagtaaaagcgcaccccgccttccccaacccaatacaccaggcagccgttgtcagctagggcggccaccgcggcatgggtgatggaggtgcccggaccgagcaagagcaaggccaggccggcgcagggcaccggcaccttgcccttcgcgtcccagaccgcaatggcccgggcctcctgttcaatcttgcagtgctccaggtacaggtagctccagccgtcccggaacttggggaggatgtgcaggtctttgattctcatggcgcttccccaggggctgagttttggcagagcgccagcgaaagaaggccaaagccgaaggccttgccggggccgatgccttggataatagtttcctgaagaagagaggggtcggtgacctgaagagtaccgtcgtatcgaacggagcgcagacgttgccctttatcggtacctgtctttttcttcttcacatagatatagcccggctgaacctgggtgcactcctccctaacagagaacccagccggttcggcccggcgcgccagccagtcgaagagttggtcattgggcaccgggacgcgtttacctatggaggcctctttcaccggctgtccgtctgcttcgagtgagcgccttgaaagccgtctcgttggattcgccgccaggcggaagcgcagactctggccccgggtgaagcagggagcgaaggattgcagttgcgggggggcggccaggagataactggcgttgtgaaaagcgtagtcccagtcgggcctgaccgcggattgcacgaggatcaccgcccggccgccgggcaacggatcaacgcggaaaagaaagccggaattctggttacgcggagcatgaacaatcgtcaaaatatggggaccggcttctgacttttttttgctcttatcggcaaagtgtcgttgttctggaaagtcgcagggttcataaggcgccacaaattcaggatcgctttgttttctcggatcggacggaaaccccatgcacaggcgctggtgcacatgatagaggttgcgcagccacaaacgcccgggcctggggcgatccggattatcgcccacgtcaatcaagagagaggacaggtgcatagctattccacctcctctgcggccaggcgccggcggcgggtctccaaggagcggaaccggatgatttcgtcccgcttccggatgatcaggtcgcgccagagcggctcttcgggattgatgcggtctaagcccatgcccaagccgtattcgatcatggtcacggcgtcgtggcagaggcggcagagggagcgcaaatcttccggggcttcatggcccccggcccggcggtaggtgatatgttgcacggtggtggccggagacttgcaaaagaggcacagatgatggtcgcggtcaagtctttcctgccgccgcctgcggtattccgtgttgcgataatcggcgcggaggcgagggggcgcaggcgtgtatttctgcactggctcatctacaggcctcaccttgctgtcgccgcccactcgtaattctctgcgcaggaggaagcgggggccatgcgccggggggtcgaaggaaaggggcacatcataccagacgagggcgtcaccgggcgcttcgtcctcttcggacgccggctcccaatcgagcaggaaatccacggttggcggcggctgatctcccttgagccgccgacgccagggaaccgctatcagcgcggcaagcaaatccgggaaattgtggggctgttccttcggcaaagattctagcaaagggcgagacgggggacaggactttcggcccaggtaaagtgtccattggggctttctaactgcttcctccaactcgacgatcagccccggttccccctgcagggcgacgaggaaagaggcatcacagagatactcgcgccgggtaagcatcgctccgggcttggactttccctcgccctcggcagtgcgcatatccatcccggcgcctactgtgtgataatcccaccagcgcaccccgggccggtccaggcgcacgcccatgcgcaaggcgcagagtttgggaaaccactcatcactggcctttggacgggaaacccccaatgccgcgcaaagcatcccgatcacgccggacttggtcggagcttcagatgtccgcctgacgacgaatttcgattgctgatcgccccaggcctggagagggccttccagacgcagaaacagggtgttggcgctcatcaggctacctccggatttaccaccaccttctggacctccttccactcatagccaagttccttgatcacctcagggatcaattcttcgagcgatttgaggttattttcggcaagggcgatttccttcttgtcttccacaatgctcaagggataacggagattgggcgagaaccagaaccggttcttcggcttgccgtatccggtgtccaggtcgtggatatattggccaagttgggcgatgctctgcgatatgatatctcgctcgctttgactca

SEQ ID NO: 870 - DNA, 4168 bp, Artificial Sequence
  Synthetic Oligonucleotide
tcgccccaccgctgaatctgcttgccatcgaagctcgtcccccagtcgaggttcaacgccctcgccgcgttgtcgaacgattgtgtcgcagcctcacgggcgatccgggacgccgctttgggcgacaggtccgcctcggtcggcaggcccccgtcccgctcctgagggggaaaaagaccggccacattgccggcagcggcaccgctgcttgtgcagcacgacaggtccgtgcggcgtgatcacctccacctggccggccccgtcatcctgcttgatcagatacacccgatcggacgagcaatgtaggcagcggccgccgcaatcggcctgcgccgacgcctccaacgccgcccgttcttccaagaaggtgggaaccagggtgcgatcgacctcgtcggccaggtcctcccactcgacgaactttttccccggcagcggcaccgattcattcgcgggaaccattttgtcgaggatggactgaaagacttgactgagccgttcacgggccttttgccgatccgtcagtgcagacataaactcctccatgagttcaaagggagccaccacaacccattgtatcccacccgcgttattcccgcccgccgaaagcgtcacgcacccggccgtcctgtactgcttgactagggcccgtctgacgaatggttttcgggtataagttctcgcttttcagcgaggttgcacggatgcgacgttatgagctcacggacgagcagtacaagatgatgcaagacctgctgccggccaacggtaagcggggtgggcagtccaatgaccaccgcaccacactcaatggcatgttctggatcctgcacaccggcgcccaatggcgtgagatgcccgaacgctacggcaagtggaaaagcgtctacgaccgcttcaaccgttggcgcaaggacggcacgatcgacaagatcctccagcgactgcaggttcgtctggacaaggacgaccggatcgactgggacctgtggtgcatcgacggcacgaatgtgcgggccagccgatctgcggccggagcgggcgattcaaaaacaaccccgacgagccggcagaccacgcactgggccgctcgcgaggcgggtttggatcgaagctccaccgggtcactgacggtgcgggagttccgctggccgccgaggtgacggccgggcagtgccatgagagcaagcccttcgagccggtgctgaatgcggtgcggatcggtcggcgtcgacggcctcggaggttggccgccgataagggatacagctacgaccacgtgcgtcgatggttgcggcggcaccgggtcgtgccggtgattccgacgcgatcgaaccagccatcggaggcggactttgatcgcgacgcgtatcgaagacgcaacgtggtggagcgttgcgtgaactggatgaaggagaatcgccgatggggcacacgctacgagaaacgggcggtgaatttcctggccatggccaagctggcgatgatccgccggtatttcaggattctggattcatcagacaggccctagacgaaatcgcaaacgctgacctgcgacgacagcgggggcaaattggcttgtgttcggcgggcccgccaacagatatcgcgcgttgtggaaggcgtaattccaatccgttcaagggccgagaggacgacgatggcgacgcttccgccgggttgcggatcgacacgaaagaggaaacccgcattggtgttacgctgcacatgaatctggccctggccgaagtcgtccggagagaatggcttgatcatgtcggcgtcgttgcacttgcgttctttcgacggaaacgccatgcaaagtcgctggtggacgcggtagagattgcgcagccatttgcggccggggcgctcacggtcggggttggtcccggtgtcgatcagcagcgtggacagaaacatcactccacctcctcgggcgcgaggcgccggcggcgtgtttccagcgagcggaaggcgatgatctcggcccgcttgcggatgatctgatcgcgatactgcaggtcttcggggttgatgcggtccaggcccatccccaggccggattcgatcatcgtcaccgcatcgtgacagagccgacagagcgaacgcagatcttcctgtgcctcatcgccgccggcgcggcggtaggtgatgtgctgcacggtggtggccggggacttgcagaaaacgcacaggctgtggtcggcgtcgaggcgctgttgtcggcgcttgcggtatacggtgttgccgtagtcggcccgtgctcgcggcggcgcgggtgtgtggctctgcctaggcgcgccaacagcgatctccttgcccgtaccgatgctcaaccgcttacggaccacgagtctcgcctcatggcccggcacatcgaacgaccgtgcaacatcgtaccagacttccgcatccccaggtgcaacatcgccaggctgggcggctcgccactccagaaggcaatcaacgccatccggcgcaagctcatcccctgttcgtcgtcgccacggaactgatcggagcgccaattcgagatcggaaaactcccccacgtccggctcgtccttccggcccagcagcggaagggacgcaggacacgatttccggcccagatagacgggccagaccggatggagcaatgcaacacgcagttggccgatcagttcgcagtcgccttgcatcgcaacgaggaaactggcatcgcagaggtattcccgccgggtcagcatcgcgcctggcttgacttcgccttcgcctttggcaatccgcatctgcattcccgcgccgacggtatggtagtcccaccagcggacacccggacggtcgatgcggacgcccatccggagatcgttgagttggacgagtcgctgccgcgcgtcggcccgcgaaacacccattgctgcgcaaagcagccccatgattcccgacttggtcggagcctggccggttcttcggacgacgaacttcgactcctggtcgccccacgattgcagcggaccttccagccgaagcaggagcgtgttttcgctcatggccgcacctccctacttcaccgtgaccgtctgaaccttttcccagtcaaaaccaatcgccttgacgacacgcgtaaccagatcgtcgagggatttgagattctgatccgcgcacgcatgttccttcttgtcttcctggaacgtaagcgggtagtggagattcggcgagaaccagaatcgctcgtggttgtctgctttgccgtagccggcgtccagatcgtggatgtactggcccagttgggcgatgctttgcgacaccatgtcgcgcggtcccttcatcggcaccggtgaagcgaaggcgttcgcgtaacggatcggagtgcagcggtctttcttcacttccacaacaatgccatcgggcgggttgtgggcggcgaagctgttctgcttgcccgtcggattggccagcgccgcaccgcgcaggaacgcgccgacggtgtgggcggccagaaactctttgatgccatcgaagccttcgagattcctgagcaatgtttcccagtggatggagaagtatttgtagaagcaggccgatgcgaacatggcttcaccgacgaagcccgcaccggcgtcgtcgccggggatgtcgtccgccgcaacgtaatagtccacctcggggcgggcttcgtgcgttgagatcgcatgagccacctggagcgatgcttccactgtggtatctgtcagcacgcccgtttccagcatcctgccggccagcgccatgtccggaaccgcgacaaggctggagatgagcttcccgcatttctcggcaagttcgtcggtttcaccatcgttctcctggagcaattgtgcgatcttcccaatggcatcctgcgtcgtgtagacgagcgaatcgctcttgtcgtcgtccttcgccttgatcccgcatttctccagtatcttcacggcccgtttcttcacatccgccttgccagtcacctgctccgcgatcagcttggcgagttgccgcgtgcggataccgccacacaacagcttgaactgttcgctggtccgaatgctccgcttggtagccgttcacggcctcgtggccggtcaggctcccgatgagcctgacgacgaacagagagtataccccccccgcaaaacgcaagccaattctcgtcaaaacgtgcggt

SEQ ID NO: 871 - DNA, 4131 bp, Artificial Sequence
  Synthetic Oligonucleotide
agcagcaggcggctgatacatctgacatgctggtttttaccacttatgatgccctgcgccaaatggcaaagctgctttccgactccaaactaagtgaaagcgaaaaactgctgcagttcaaagatctgctcacaaactgcgtccattctccggatatagcactttgcggcaggatgctggagaccaaagagcttaaaaacactggcgttgaaggcgccctacaggttgcacatgcgatctccacccacattgccagacctgagatagactattttgtggcggccgatgatgttcccggtgaagacgccggagcgggtcatattggcgaatccatgtttgcctcagcctgtttctacaaatacttctccattgattgggaacagttggtcaagaacctgaaaggggacacgaatctggcagcccacaccgtgggtgcctttctcctcgccgcagccaaaaccaaccccagtggcaaacagaacagcttcgccgctcataactatcccgatggcatccttgttgagttcaagaattcccctattagctacgccaacgcattcgtcaggccagtttccgtggtcaaggaatcggacctggtggaacaaagcatcggccagctttccaactacgtgaacgacatcaggcttggctattatgatgagcaatccccagttatcagcttctggttttctccaaacaatcgctattcccttggcaatgagcattccaaactggcttccagaaacattggcaacctcaatgagcttgtaggcgctgtgttggattatattggcggcttcaagtgggaagaagttcagaaaagcaaggcttatgttggcggctgacatgagtgcgccacccaacaccttattcttgcgcttggagggggctttgcagtcttggggcagcaacgaggctaagtttgctttgcgcaggactaccgacgctcccacaaaatcaggtgtcctggggctgctttgcgcggccatgggaattgggcgcgcggaggctgctgattcatggctcccaaaactcgccaacctgcgcatgggcgtgcggatagaccgccccggcatacgctggtgggacttccatactgttggagcgggacaaagaatgcgcatggcagagctgaaggcacccaaaaaaccttccatggttggagctgccctggctgataccctgacaccaagcaaagtaaaaaccagggcagagaccttgctctcacgccgcgaatatcttgccgacgccagttttctggtcgccttgcagggtgagccggaacttgtggaaaagctctccgccgctctggccaagccggtctgggcaatttatctggggcgcaaatcctgtcccccttcacgtcccgtgggcgagcatgctccgggcttttataacactttggaggaggcgctgtccgcggttcccctgcaaaagcgctggcacaatgaacccctgccgcaaatactgccttgcgtcatggactggatccccagccaggacggagaacatgcgcctgatgacgcggagattcattacgatctgccggtttcttttcagccgccccgccatttgccgcgcttcgtgatcaggcgtgagctggttgtgggagaggatgtgcaagtgagcagggaaaccggaaccagcgtttggaggcccaaaggaacccgggcggattataacaattccgagtataagaaggtcagggcggagcggcttgtgatggaccatgccgcgtgcatggtatgcaaagctcccgccacgactgttcaacacgtgaattaccgcagggcgggaggcaaggaaataccggaagacctgcgggcgctgtgccgcctctgccacgacgcctgcaccatgctggaatacggttccggcatgaccaccgaccgcatcgacccctgcgaccccatatggcgggagcgaatactggcaaagcgcaaagatatagtcgagttccgttcgcgcgggcagcgtttccgcaaaatgaagccagaggaggaaaacggatgatctacttgtccaagctattgatcgatactggaggcaatccagaccgtccccgccccggcagaaagtggctggacaatatctataacgtccaccgccgcctttccatggcgttcccttcaggtttgcgccgggagcaggatccgcatttcctgaagcccttttcgccaaacgacttccaaaaaactcccttccttttccgggtcgataacaacatcgacggaaacgataaaagggcgattattatcgtccagtccgttcttgagccggattgggattattgcttccaaaacgcgcttgatttcctggcagcgccaccggaaacaaaggagtataatccagagtttcaagcgggacaactgctccggttcaggctgcgggtaaacgccagcgtacgccgtcatattcctgagaaggtgcaacaggacggtcaaaccatagaaactggcaacatcctgcacaaaagggtttctctcacctgggatccctcttccaccccggatcaggcccttgccgactggctggctgccaaaagcccaaagctgggcttcacccttcagcgctgtgagcttcttcaactgggttgggtttatggctccaagcctgaacctaaaaatgtcaaagcaaaggaacagggacagggctactggcgtgaacacacatacaatcctctgcgcttccgttcggctctactggagggaattctcaaagtggatgacccgaaactgttcctggaaacgcttagaagcggcattggaaaagcgaaaagcttcggctttggcctgctgtccgttctgccaatcaggaatgatgaataaagacctgcactctatcccccggatcagagatcggcttagctatctctatgtggagcatgccaaaattgatcagaacgggcaagccatcgccattcacgatgccctgggagaaaccccggttccttgtgccggcttggctatgctgatgctgggaccgggcataaccatcacccatgcggcaatactttcactggctgcctgtggctgtctggtagcctgggtgggggaacatggcgtcaggttctatgccgcaggcacaggtacaacccgtagcgccgtcaatcttatgaaacaggcaaagtactgggcagacccggttttgcatttacgggttgtgcgctccatgtatcagttgaggttccaggatgagctttctcctgatttaactttgaaccagatcaggggcaaggaaggtgcccgggtgcgcgatacatatttccaactctcccaaaagtatggtgtgcccatgcagggcagaaactatcaaagagacaactggaataaagcggatcccataaaccgggcattatctgtggcaaactcctgcctctacggcatatcgcacgctgccattgttgctgcaggattctctcccggattgggctttgtccacactggcaagcaactgtcatttgtctatgatatcgcggatctatacaaaatggaaatggctgctcccgccgcattccgggcgaccgctgaagggatcggcgaactcgaccgcagagtcaggcttgcctgccgtgatgaattccacaggcagaatctactcaaacgcattgtcgcggatattagttctctcttcggtgatattatgccagaggatagcccggatgactgttttgccgaagaaccagccttgcctggaggactctggtctccagatggagaagtttccccaggcggcatatcttacgggcaggatgatctgccaaaggaagattgatggtggttttagtattggaaaatgtgccaagctccctgaggggtaagatcacacgttggctgctggaagtaaaagccggggtgtttgtgggtaaagtctcagcaatggttagagataaactgtgggataaggttagaagcaattgcagcggtggaacttgcctgatgatctggagtagtcagaccgagcaagggtttgatatcgaattctggggtgccgcatcaagagtcgttacggaatgggagggtatcaaacttatgaccaagcatccttaaactaaggcttgaaggagttcaatgacctcttagacctctattgatcaagtgtattccccatgcatgtgggggtgaaccgtgc

SEQ ID NO: 872 - DNA, 4121 bp, Artificial Sequence
  Synthetic Oligonucleotide
tcgtgtcctggaagacaagcgcgagattgagttggccgagaagaacatcaagtcgctgaacgaattgactccagccgttatcgctgccatcggctttgactggaacgctgttcagaaggtaaccgtgaatccagaggttgcctcatgagcatcaacacactatttcttcggttcgaaggtccattgcaggcgtggggggctcaagaatcgaggttcctgattcgcagaacggccgaggctccgacgaaatcgggtgttatcgggatgctctgcgctgctttgggtgtatccagagggcaggcttcggaagagtggctttcgagactagcagccttacgcatgggcgtccgtatcgatagggcgggcgtccggtggtgggactatcacactgtcggtgcagggatgcagatgcgtattgcggaaggaaagggaaggaccagacccggcgcgatgctcacgaggcgtgagtatctttgcgatgcttcctttctggttgctttgaatggagacccaagacttgtcgagatgctggaagcatcaatgcgacgaccgagttggactctataccttggaagaaaggcatgtccaccgtctcggccgctgctggaagagaaacctgttggcgacttccttgatatggattcagcgctggcttcaatcccttggcgtcggaggttcaaggatgagcagccgccgcaaagcgtggagtgcctgctcgattgggagccgacagccgaggcccccgaggctcccgaggatgccttggtctggtacgatgtgccagtcacatttgagcctccagcgcatcgtccccgattagttatccgcaaggaattggttgtaggaccacgcggcgacgtcagtgtggggaaagacccctcgcagaatcccactccccgcccgcctcggccgcgcgcggactacacgaacagtgaatacaagagacgccgccagcatcggttggaatccgattatgggctttgtgtcttttgcaagtctcctggtaccaccgttcagcacgtcacgtatcgccgtgctggcggtaatgaagcgcaggaggacttgcggtcgctctgccggctctgccacgattcggtgaccatgatcgagtacggtctgggcatgggcctggatcgcatcgacccgtgcgagactcgttggcgcaaagcgatcgtcaagaaacgcgacgagattgtaaaattccgttcgctggagacacggcgtcggcgcttgcaaccagaggaggtggaatagccatgtacttgtcctgcctgttgataaatatgggaacgaatcccgatcgcccgcggcctggaaggttatggctccgcaacctctaccgggtccaccagcgtctctgcatggcatttccaacagcggtacaaaaggactcagacccggaattcctgatgccatatcagccctgcggctttcgagatccccggcccgaacggtgctatgccggcaccagcgaagcagtgctttcgccccggtgtgcggtttcccgcgaggagcacccggttcatgttcgtcgcgatatggagcacaacttcttattccgcatcgagccacaacccggtggtcgagcagtgattcttgtacagtctgccgtgaagcctgactggagctacgctttccacaatgctggccatcttttgtcagcaccagtggaggtgaggtcattcacccagcgattccacccgcaccagtcctttcggttccgtatccttgcaaatcctgtgagaaaggtgagcccaagatccctggactttgaaggtaaaccctttcccgaaaggtggcaccggaaagacgttcccgtaccgacggctgacttgagaaaatggctggagcgccgtgccgaacctggctggtcagcgccgaagaattcggaagacatgcaagttccgcccggtttttgcctcgttgatctcacggagatccaagccgggtatcagtatgtcaacgagaccatggagaaggggggcggccgacggctacgatccgcccggtacgagggcgtccttgaagtcaccaatgccgaccatttccgcaatacggttatcaaaggtatcgggccggccaaggccttcggtttcggtcttctttcgatagcgccggtgcgctcctgacttcgggagggtggagccatgagaattcaagatctgcacgttctgccgaaatttcgggacggatggagctatctgtatgtcgagcattgcaagatcgagcaagacagcagatccatagccctgttcgacactgcgggaaagacctccgtgccgtgtgcaacgctctgtctgctcatgctcgggccgggaacgagcatcacgcattcagcagtgtccgcgctggcggacaacggttgtcttgtgtgttggtgcggagaagaaggagtgcgcctctacgcgtacgggcagggcaaaactcggcacgctcataatctgctccgtcaggcgcaattgtgggcagatgccgacctgcggctgcaggtggtgaagaaaatgtattccatgaggttcgatgaaccgctggaggagtcgctcacgttacagcaaatccgaggccgagaaggcattcgggtccgggaggcttacgcaagtgccagccgtgaaacgggagtgccgtggcacggccgctcgtacgaccggaatgactggagcagtggcgatccggtaaaccgtgccttgtccgcggcgaacagttgcttgtatggcatctcgcaggcagggattcttgcacttggcctctcacccgcgctcgggttcgttcacactggtaagatgctgtcgttcgtgtacgacatagctgatctgtacaagaccgaaatctcgatacccgttgcttttgcggctgctgcccaaggccttgagaagctcgaaacccgcgttcgcaaagcccttcgggacacgatgagagagagaaagctgctcaagaccgttgtcgcggacattcaatccgttctggaccttcaacgcagaggccggatcaggccggacgagatcgacttcgatgcggacccggccggcccgggtagcttgtggaatccatcgggtgacaacgatgccggagggaggaatttctctgacgactttgctgaaggaggagaagatggtgatcctgctccttgagaaagttccgcaggggttgagaggcgagctgacgcgctggatgctggaaccgaaaacaggcgtctttgtggggagcgtttcgggaatggtgcgagagcttctgtggaaaaagatcagcgacgacttgcggggcggttcgtgcctgatgatccacagtgacaccaaggagcagggctattccataaggagtttgggcgagcccagtagagaggttgtagacttcgaggggttattcttgatacgagtcccggagtgatgcgggtttggtcagtgttgtccccacgcacgtgggggtgaaccggtataaaggtacgctccctgctatttcccgcagttgtccccacgcacgtgggggtgaaccactggccggacctgacgtgctctaatctgtggagttgtccccacgcacgtgggggtgaaccggtgcttgacgctgtaactaacctgagatgccagttgtccccacgcacgtgggggtgaaccgggcacccagtttgcccccttgggcacaagggagttgtccccacgcacgtgggggtgaaccgctgacacttgacgagttttccgggctgaaagggttgtccccacgcacgtgggggtgaaccgatgttttgccaccgatttgagatatttctcacgttgtccccacgcacgtgggggtgaaccgatgttttgccaccgatttgagatatttctcacgttgtccccacgcacgtgggggtgaaccggcaacggtccagaaaaccgatggtcgaaaggcgttgtccccacgcacgtgggggtgaaccggcgcattaaaaaagaagatcctttacgaagtcgttgtccccacgcacgtgggggtgaaccgcgcttaaactctatctcctggccatgggattcgttgtccccacgcacgtgggggtgaaccgtgttgatgccccttcgcatgtttgccaggacagttgtccccacgcacgtgggggtgaaccgatcagatagaggcggaagaaa

SEQ ID NO: 873 - DNA, 4121 bp, Artificial Sequence
  Synthetic Oligonucleotide
cgtggggaatacgcggagccatgccaatgcacggctgatggcgcctggttcacccccacgtgcgtggggaatacttccttctaccgtatctgtctaccgtatctgccggttcacccccacgtgcgtggggaatacgcggaacatcggcaggatctcgcccttggtgacggttcacccccacgtgcgtggggaatacgaacgtcagtgtggtcagtttcatcccgcacgcggttcacccccacgtgcgtggggaatacgggcgagaaccgctatccgctggtcgggatcctggttcacccccacgtgcgtggggaatacagggcctcgacgaagccggccagttccgcgggcggttcacccccacgtgcgtggggaatacgtattagtcctatggtcctttgtgttgcattgcggttcacccccacgtgcgtggggaatacggcctggaccgcgttgcccgcgactacctgggcggttcacccccacgtgcgtggggaatacggcaaggtccaccagatgctcggccagaccagcggttcacccccacgtgcgtggggaataccgaagtgaatgtgccccggccaagcctgtgcctggttcacccccacgtgcgtggggaataccaaatccggaatgtccggcgtggcccgacggacggttcacccccacgtgcgtggggaatacgagggcaaggcgttcccgctcggcgcggacatcggttcacccccacgtgcgtggggaatactttcccaccaccgccctctccgccccggccgccggttcacccccacgtgcgtggggaatacactgacaatctaggcttttttcgatgatttagcaaggaaaaggccgtcgaagtctacgaatcgccggctggggtcgccggcagagcggacggagaaaccttgctcggtgttatcgctataaatgattgtggcagagccggttgccttcgattggcacactttgtcccacagaaggtcgcggaccctggccgagagccaacccacgaagacgccggccttgacctcgatcagccagcgggtcacttcaccccgcagagagggtgtcactcgctccagtatcatgacgatcatcgggtttctcctgcacggggaagttaagcgggtccagtttcagaatggttccgatgggcgtatccggtcccaggcaggccggttgccacaggtcggccggcagggcggcgtcatcggagtaggcatcgtcctggtcggccagggctgcgctgaggggcggaacatccagcgccttctcaatgtcaggcaggatgcgttccatgagcttggccttgcggaaggtttcccggcaggtgaggcggacttcgcgttccagttgtgttgccccgccggcgacaacggcgaaggcagtgggaatggtgtagtcggccttgtagaggtcggctacatcgtacacaaaggacagttgcttgccggtgtggatgaaacccagggcggtgctgtagccgccggagaggattgcggcgtggaccaggccgtacaggcaggcgtttgcggacgacaatgcacggttgatcgggtcggcgtagtcccactgctgacgtttgtaggaacgcccctgccagttgatgccaaaggtgcgagcggcctcggcgtaggcctggcggactcgaatgccctccttgccccgcaactgctgcaaggtgaggtcgggatcgatggcttctctgaacctgatgcagtacatccggatgacgacttgcagacgggtgatgtcgttgctgaccaggcgggcctgttggattatatttcggctgtgtcgagagccgcccaggccctgggcgtagaatcgtacggcgtcctccccggtccagatgacctggcagttgttgtcggccagggttttgatggcggcgtgggtgatggaggtccccgggccgagcatgagcacggccaggccggcggcggggatggggacggagccatcggcgtcgtgcgcggcaacggccttgtcgcactggtcgataatggcatgctccatgtagaggtagctgagcttgtcgccgaagcgaggcagttcctgaaggttcttcatttcggtttcgccttatgtatgcacttgtcaaagagcggtatcggcctcatcgccgaagcggaataactcaaacccgcacgggcgcgagagacaacaggccgaagccgaaggccttggccgggccaaggcccgcggcgagggtttgggcgaatttatcggcgtcggttacttcgaggatgccttcgtagcgtgcagagcgcaagcgctgggcagcgtcctcccgcccacccttgtggacgtacacgtagccgatgttggagattgtgaggtccttcgggtcaatcctaaagccggccttttccgccctggcgcagagccagtcggcgaacaccttggcggggtccgtgtcggcctgccaagtcagttgcacgcgcgggcgtttgaggcttttgacttccccgtcagcctgcttttggagccgctgctccttggtcaggggcgggcgcttcgttgggtttgccaagaggcgaaagcgaagccgcgtgcctggctcgatggacagttcgagcgggcgcggcttggccggcggcccggccaggagataccgggcattgtggaaggcatagtcccagtccggttcaacagccgacaggacgagtatgactgcactgccgccgggctggggatcgacgcggaaaaggaaccccgctttgctgccccgcgcaacgtggacctgcccatcgccgaactgcgccgggtcgtaaggtttgaggaactccgggtcggcgtcgacgcggggcctggaaggaaacgccatgcaaaggcgttggtgaacgcggtagaggttgcgcagccacagccggccggggcgggggcggtcggggttgctgccgacatcgatcagaagggtggacaggtacattactcgacctcctcgggggcaagtcgccgacggcgggtttcaagggaccggaaggcaacaatctcatcacgcttggcgatgatctttttccgcagtttcggatcctccgggttgatccggtcgagccccatgccctggccgtactcgatcatcgttacggcgtcgtggcagaggcggcagagagcgcgcaggtcgtcgggttcttcgccgccgccggcacggcggtaggtgatgtgctggaccgtggtggccggggccttgcagaacacgcacaggccatggtcggcgtcgaggcgttgttgacgggccttgcgatactcggtgttgcggtaatcggcgcgcgggcgaggcggggccggggtcctggtttggcgcggcgggcctgtgggaacaccttttccatcgcccacggtcaactggctgcgaacaacgaacctcgcctcgtggcctggcacgtcgaaggacagggcgacatcgtaccagacctcggcgtctggcggcgcctcgggttctgagggggacggccgccataccatcagacactcgacgcgctcgggccgctcgtcgccggcaaggcggggtcgccaggggatcgagcatagcgctgacggcagatcggtaaagtcgcctatgtcggattggtcattccggccgaccaacggcagcgacgggggacaactcttgcgcccaagaaacatcgtccaaaccggctgtaatagcgcatgatgcaactcatgcaccaactcgggattgccctgaagggcgaccaggaaactggcgtcgcacaggtattcccggcgggtgagcatcgccccttgtttggtcttgccttcgccttgagcgatacgcatttccattttcgcgccgacggtatggtaatcccaccagcgtacgccgggccggtcgatgcgaaccgccatagccagggcgttgagcttcgggagctgttcccttgccgctatcctggaaatacccatggcggcgcaaagcaggccgacaacgcccgatttggttggggcttcgccggtccttcggatgacaaacttcgattcgtggctgccccatgattgcagcgggccttcgaggcgaagaaagagagtgtttgcgttcatcgtcacgacctccttactttaccgtgacggcctgcacctgtgcccagtcgaagccgacagcccggaccacctcg

SEQ ID NO: 874 - DNA, 4115 bp, Artificial Sequence
  Synthetic Oligonucleotide
gttagaggttacgcagccagcgacgggtgatgttccagtccggccggtcgggatggtcaccgacgttgatgagcaagtgggaatggtacatggctcaggcctcgtccttttcaaacatctcccggcggacgcgctccggcgcaccacgcaaggcgcggcggcgggtttcctcgctgcgaaagcggacgatctcgccgcgggtgcggaggatgtcatcgcgccagagggtgtcgcacgggtcgatgcggtccaggcccatgcccaagccatattcaatcatggtgacggcgtcgtggcagagacggcacagggcgcgcaggtcgtcctgcgtctcatccccgccagcgcggcggtacgtgacatgctggaccgtcgtgccggtctgcttgcagaaaacgcagaggcctttgtcggattccaggcgcgcggcgcgacgcttctgatactcgctgttcctgtaatcagcgcgcggtcgtggcggcggaggcgtgcggtgctggagcggggacccaacgtgcaccgtcaccgtgtcccgcatcaccaaacgcggctcgtggacgggcgggtcaaaacaaacgggactgtcgtaccacgcctcggcctcagcgggcgcgacgtcgtcggaatgggcgccgcgccactcgctcagcagttctacatcgaccgaagtaagacgctttccgcgggtgtcccgcggggcgtcgtgctcgtatcgcggacaccacggcacagcttggagcgccgccttcacgtcaccttcgacgaccatcgggttggtccatggctcacccttgtccttgcgtggccgcgcgaacacgggcatagacggcggacacgacttacgccccagatagagcgtccatttcggggagcgaagcgcatcggcgaccttctcgacgatcgtagaatcaccttgcagcgccacgagaaaactggcgtccgccagatattccaggcgcttgataagcgtgccctttgccccggtcttcaatccgcccgcagccgtggtcatgccaatgcccgccccaaccgtatgatagtcccaccagcgcgtgcccgatcggtcgatgcgaacgcccatcgccaacgtgttcaggtcgggcaggtaagcccgcgccgcccggcgcgaaagccccatcgcgcagcagatcaatcccagcacgccggacttcgtgggcgcttccatgctccggcgaatgacgaacttcgacgtatcgccccacgcttggagcggaccttcgaggcgaaggaagaccgtgttgttgccaaggccagcggaattcatgacgccgcctctgcaatctgctcgcctttcaccgcggtcatgacacgctccacgaactggctgtattttccactgccgacgtcgccatcgatcaggtgcttttcgctgttgccttcaacatacgttagcgcatatcggttggacggggagaaccagaagcgctgcgcctcgatgtcgtacccgtcgccgatgtcgtggacgtactgcccgagccgagcaatgctctcaaggataagacctcgctgcgatcgctccggaaccggatcggcgaatgcgttagcgtagctcaccggcgtcgatgactccgtcttcacctcgacgagaatcccgtccgggcaattgaacgccgcgtacgcgtgctgcttaccagagggattcgcctttgcggcaccttcaagaaagcacttgacggtcgtggtggcgagctccacgtccccgtcaaggtttttgagcagttgcttccagtcaatgcagaaatgcttgtagaagcacgccgagttgaagacggcctcgttgacatggccggcaccggcgtcatggccagggacgtcatcggccgccgtgaagtagtctacctcgttcacgaccgcgtgagtcgagatggcgtgtccggcggagagcgcggcctcgacagtaaacttgcccttgagggtctcgaagggtcccttcgcatcaaactcggtcatccgaccgcacagggcgatatccggggtcttggcgaacttgccaacgatctccgcgaacttcgcaccgagattggacgagttttccctaacggccgcacccataccgtcgatcgcggatctcggaagaaagaacaggatgtcggaagttgtctcgtccttgaacccgacgcctccatcgtcgaacacctttcgaatggccttcaagtgctgttccttgggctgttcgccttgggctacggcggctcttgcgatctcttcaacgagtcggcgcgtgcgcacgccgccatctttttccagcgcggtggcgaattcggcgctacgtcggatgctgcgcttgaggcactggctggagatgcgggcgcgggtcacgccgccgaagatgcaggtcttgggcgcgcccaggtcgtcccgattcaggttcgaggggctgtggttttggatcatgtgaatctcaatcagcatggctcgctccttgcagttgataaactgcattcagatattggtctgcccagatgtcgcggatatcgcggtagcgccggtggtcgtcgccccggtcccaaatcgacaggtcgtccaataattgcgcccagtcgacgcccttgatccctctcgcgtacggcacgcggccctcgaccgccttcgctacttcgtccagtgcccagcgcaggtgcggttccaagctggggagtggcgagcagagcagggcgtcgaagcgaatgcggaagcgcgggcccccgtggtcctcgcgcggctcgcacagccccagcaccgcaggcagcgtcggccccgagccatcgtcgggcctcacgtgcgggacggcggcgccgaatgcgccgtgcagcttcgccacgagccagcttgtctctctgcgcggcgcgacggggcttcgctgccgtagcggccaccacaggccggcgaacaggtcgaagccctgaagcgactggttcaacggttgccccgcgagccggcgcaagcgcgagcgatcgccttctttgagcttctccagccgttggataaatgcctgtatctgactcatgcccccaactccttcttctttcggcctcgtctgggcttggcgggaacagccccgtccgcgtctactcccccgggcggttgatgcgttttgtggaccagttgcttgatcttgcggttaagcagggcctgtgcgtggtacttcgccgcacgccgacgcaacgccgaaccgcgagtcgtggacccgacgacgcgctcgaccaagggcgcatagttttcttgcagaaacgtcgtgtcgtctctcgtggtgtccggctccttcagcgtggcgagaatccgcgcctccgtatccggcattagcagtacaagagccgcattgatttcaggatgctgacggtcggggtctggggtgacctccttcagcaaagggcgcaagttgtcgctgcactcatcggaaagcgcggcccgtgtccgggccgaggtagtcggtatgccgatggaagtggcgtcctggaaaacgaatttattgacgacggggccgatcgctacggccttgccggtctgcccaccacgcaggcgaagggcatctcgccaaaatcttggctcttcggcagaattcgtgggttgacagtgaaggctggggctctgccccagaccccgagattttttgaggcatggctcccgtgtccgatgggtggagggaagaggccccgcggtccgcgacgggaggcggggcctgcgccatcggcgcacggtcgacttggctatcccttgccgggttgcgtccccgcagagcccgactccgtttcgccaagcgtaaggaacatacgcgaaagggtgcctgagtgacaacaggtcagggcgtggaaccgcaagcaggaccggcgcaagcctggaggcagaagatgaagcaccgtccgaggttccggtacattggttttggaaacagaaccaaccggaggtcctcggacgatgcaagtgaagactatcctgaatcgcgttcatccgatcaaggggtccgtgtacggcaagattggattcgtgggcgactcgatcgaggtggaggtgcgtccccgcaagcgatcgcgagctttttgctccggctgcggccggcggggaccgacgtacgatcaccagggggtgcggcggttcgccttcgtgcccctttgggc

SEQ ID NO: 875 - DNA, 4064 bp, Artificial Sequence
  Synthetic Oligonucleotide
aaacacttcgtcattgacttcgagcagttgaagaagaacctggcggacgatgccgacctcgcccgcaagacaataaggtgcttccttgaagcggccgccaaggccaacccctccggcaaacagcacgccttcgcggcatttaatccgcccgacgcagttctggtcgaggttaaaaccaagtcagctacgcccgtcagctacgccaacgccttcgccgatccggtgccggaaaagtccgaacgcggtttgatcggcgaaagcatcgccaggctcggccagtacgcccaagatctcgttgcaggttacggcatcgaggccgatcgtttctggttctcgccgaatctgcgccatcgcctgacctggatcgacaaaagccagaaggaacacgagcaagaacaatccgtggtcggttccgacgagttcggcgagttcgatcagttcatccataaggtcatggacaagctcggggcaaccggggcgcctgcggaggcggcgaaatgaccgacgccaacacaatcttcctccgcctggaaggccccctccaggcctggggcgacacgtcgaagttcgtcatccggcggaccatggatgccccgaccaagtccggggtgctgggcctgctctgctgcgccatgggcctgtcgcgtgagaaggcgcgggaacgcctgccggagttgaacgggcttgcgatgggtgtgcgcatcgaccggcacggcacacggtggtgggattatcagacggtaggagcgggaatcggcatgacaaccgctgggaacgaagtgaagaccggcgcccagggcacgctcatcacgcgccgggagtacctggccgacgcgagctttctcgtggcgctccagggtgatgcgaagttgatccatgaccttgccgcggcgattgcgtcgccgaagtggccggttttcctcggccgcaagtcctgcccgccgagcgtgccgatcctcgtgacgcgaaagcgcgaggacggcacctgcgagccgcatatcgaaacgggcaggtccctgcttgatgccctcaagtgtgttccctggcaaccgcgcctgcccaactttgagcctgacaagaagcctgataagctcgcctgtatcctcgaatggcgggcgacggacaccgagccggaagcccccaatgatgccgaagtctggtacgacgcgcccgtcgcgttcgatcctccggtacatcatccgcgtttagtcacgcgcaccgaactcaccagcggagcgaacggtgtgtccaccgacggtgccacgcaagagcgtgtgccgcgtcccccccgtccgcacgcgaactacaacaacgctgaatggaaaagcgagaccctgattgccgaccccgccgatccgtctcgcaaggttcccaaaggcatgaggccgcgccgccttcagcgtgaccacggcctctgtgtcttctgtaaagccccggcaaacaccgtccagcacatcacctaccgaagggccggcggagacgaaaccctggaggacctgcgttcgctttgccgcctgtgccatgacgccgtcaccatgctcgaatacggcctcggcatggggctggaccgcatcaatcctgaggagccccgctggcgcaagccgatcattcaaaagcgggccgagatcgttgaatttcgctcgctggagacccgccgtcggcgtcttgccgccgaggaggtggaatagccatgtaccggtcctgtctattgatcgacgtaggcggcaaccccgaccggcctcggcccgggcggtcgtggctgaggaaccgctatcatgtccaccagcgcctttgtatggcctttccgtccgcgtcccggaaggccgaagatagggacttcctccaaccgttcaaaccggatgagtttggtaaaggccaagtccatgtgaagcgtgccgtgggctcgggatttcttttcctcatcgaacctctccgcggcggcagggcggtaatcatcgtgcagtctgccatagagcccgactggtgctatgcctttcacaatgcggattatctgctggcagcgccccctgaggtgaaaccattcgacccacgcttctcggaaggccggtgccttcggttccgcctcgcggcaaatccgaccagacgtctgtgcaagcattcaccggatgcaaaagaagaatctatcggaaagcgcgttcccgttccgaccaaccggcttgtcgactggcttgcccgccgggccgaatcggcaggattccatatcgaggaagacgccacgacccttcagccggggttcgtctatatgaacaaaaacggcaaggggcagcgtctgcgttcggttcttttcgaaggcctcctccaggtcacggacccggatgcctttcggcagacccttatccgcggcatcggttccggcaaatccttcgggttcggcctgctttcgatcgcgccggccaatactgcgggctcggacgaggcgacatgagagtccgggacctgcagattctgcccaagttcagggacggctggagctatctctacgtcgagcattgccgcgtcgaccaggaagtccgggccattgccatccacgatgcatccggcaaggtgcctgtcccctgtgcgaatctggcgctgctcatgctggggccgggcgtatcgattacgcatgccgccatttccgtgttggcggaccatggttgcctggtcatctggtgcggcgaagagggagtccggttctatgcggcgggcatgggcgagacgcggagcgcggcgaacttcctgcatcaggcgcgggcttgggcggatgcggaccttcatttgaaggtcgtgcaccgtttgtaccagttgcggtttgccgagacgttcgatccgaagctgaccctgcgccagatccgcggaatggaaggcgtccgtgtccgggatgcctatgcccgggccgccagggaaaccggcgtgccttgggcgggccgcagctaccggcgtgacaagtgggcccatgcggacccggtgaacagggccttgtcggcggccaattcgtgtctttacggcatttgccatgcggctgttacttcggcgggattctcgcccgcgctcggcttcatccataccggcaaaatgctgtccttcgtttatgatgtcgccgatctttacaaggcggaaatttctatcccagcggcatttcgcgcagcagcgcaagagcaggccaggctggaacgacatgtgcgcatctcgtgccgtgacctgtttgtgtcaacaaggcttctggagaggatcattcctgacatccaaaaagcgctgatgttgccaaagaaaggcgcgacaagtgatgacccattcggccaggacgccgccgccccaggcgctttgtgggaccccttgacgggagaagtagagggcgggtgcacctatccgttggaaactgatgaaacggaggccaacgatggtggttctgattcttgagcgtgtgccgcctgggttacggggtgaattgacacggtggtttctggaaccgaagacaggagtttttgtggggagggtttcagccatggtgcgcgataaactctgggaaaaagcctgcgggaatgccaggaggggcggttgtgtgatgatgtattcgagcgacaatgagcagggttttcggattcggagttggggaaaatcggcgcggtcggtcgaagacttcgaggggctatttctcgtcagggtgccgtaaattcaggtttattcagtagcgtccccacgcacgtgggggtgaaccggcaacagggacagcaggtagttcatcaccaacagcgtccccacgcacgtgggggtgaaccggtgagctgctcgatgggggtgtcgccttcggcagcgtccccacgcacgtgggggtgaaccgcaatcacaaacggagtttgcgacaagtgttgggagcgtccccacgcacgtgggggtgaacctgccgtccttcagggcctgcagggcttcactcgcagcgtccccacgcacgtgggggtgaaccgccacgacggggttatagccaccgccgttcacgtagcgtccccacgcacgtgggggtgaaccgtcggccaggtagggacgaatgaatccctgcagcagcg

SEQ ID NO: 876 - DNA, 4048 bp, Artificial Sequence
  Synthetic Oligonucleotide
cactgcgtcggttcacccccacgtgcgtggggaatacgtgtccagaccggtctatcctagtagcctccactggttcacccccacgtgcgtggggaataccggaggacctccgaccagccgatgcgtgcgcccggttcacccccacgtgcgtggggaataccgggcctgatttcctggtatagcattagatcacggttcacccccacgtgcgtggggaatacaagacatgggatgccaacgccagggcggcggccggttcacccccacgtgcgtggggaataccacatcccgcctcgaaccatccgctgtttcctcggttcacccccacgtgcgtggggaatacactgacaatctaggcttttttcgatgatttagcaaggaaaaggccatcgaagtctacaaatcgccggctggggtcgccggcagagcggacggagaaaccttgctcggtgttatcgctataaatgattgtagcagagccagttgccttcgactggcacactttgtcccacagaaggtcgcggaccctggccgagagccaacccacgaagacgccggccttgacctcgatcagccagcgggtcacttcaccccgcagagagggtgtcactcgctccagtatcatgacgatcatcgggtttctcctgcacggggaagttaagcgggtccagtttcagaacggttccgatgggcgtatcgggtcccaggcaggccggttgccacaggtctgccggcagggcggcgtcatcggagtaggcatcgtcctggtcggccagggctgcgctgaggggcggaacattcagcgccttctcaatgtcaggcaggatgcgttccatgagcttggccttgcggaaggtttcccggcaggtgaggcggacttcgcgttccagttgtgttgccccgccggcgacaacggcgaaggccgtgggaatggtgtagtcggccttgtagaggtcggccacatcgtacacaaaggacagttgcttgccggtgtggatgaaacccagggcggtgctgtagccgccggagaggattgcggcgtggaccaggccgtagaggcaggcgtttgcggccgacagggcacggttgatcgggtcggcgtagtcccactgctgacgtttgtaggaacgcccctgccagttgatgccaaaggtgcgagcggcctcggcgtaggcctggcggactcgaatgccctccttgccccgcaactgctgcaaggtgaggtcgggatcgatggcttctctgaacctgatgcagtacatccggatgacgacttgcagccgggtgatgtcgttgctgaccaggcgggcctgttggattatgtttcggctgtgccgagaaccgcccaggccctgggcgtagaatcgtacggcgtcctccccggtccagatgacctggcagttgttgtcggccagggttttgatggcggcgtgggtgatggaggtccccgggccgagcatgagcacagccaggccggcggcggggatggggacggagccttcagcatcgtgcgcggcaacggccttgtcgcactggtcgatactggcatgctccatgtagaggtagctgagcttgtcgccgaagcgaggcagttcctgaaggtttttcattcccgtttcccttatgtatgcacttgtcaaagagcggtatcggcctcatcgccgaagcggaataactcaaacccgcacgggtacgagagacaacaggccgaagccgaaggcctttgccgggccgatgcccgcggcaagggtttgggcgaaggcgtcggcgtcggttacctcgaggatgccttcgtagcgtgcggagcgcaagcgctgggcggcgtcctcccgcccacccttgtggacgtacacgtagccgatgttggagattgtgaggtccttcgggtcaatcctaaagccggccttttccgccctggcgcagagccagtcggcgaaggcctcggcggggtcgtcgccctctttccatgtaatctgcatgcggggtcgtttgaccttttcgcccgcctgcttcttctcgatccgctgggccttggccaggggcgggcgctttgtcgggttggccaggagccgaaagcggaaccgccttccgggctcgatgagcagttgcaggggccggggcttttctggcggcccggccaagagatgccgcgcattgtggaaggcgtagtcccaattaggctcgctggccgacaggacgagtatgacggccgtgccgccgggctggggatcgacgcggaaaaggaaccccgctttgctgccccgcgcaacgtggacctgcccatcgccgaactgcgccgggtcgtaaggtttgaggaactccgggtcggcgtcgacgcggggcctggaaggaaacgccatgcaaaggcgttggtgaacgcggtagaggttgcgcagccacagccggccggggcgggggcggtcggggttgctgccgacatcgatcagaagggtggacaggtacattactcgacctcctcgggggcaagtcgccgacggcgggtttcaagggaccggaaggcaacaatctcatcacgcttggcgatgatctttttccgcagtttcggatcctccgggttgatccggtcgagccccatgccctggccgtactcgatcatcgttacggcgtcgtggcagaggcggcagagagcgcgcaggtcgtcgggttcttcgccgccgccggcacggcggtaggtgatgtgctggaccgtggtggccggggccttgcagaacacgcacaggccatggtcggcgtcgaggcgttgttgacgggccttgcgatactcggtgttgcggtaatcggcgcgcgggcgaggcggggccggggtcctggtttggcgcggcgggcctgtgggaacaccttttccatcgcccacggtcaactggctgcgaacaacgaacctcgcctcgtggcctggcacgtcgaaggacagggcgacatcgtaccagacctcggcgtctggcggcgcctcgggttctgagggggacggccgccattccatcagacactcgacgcgctcgggccgctcgtcgccggcaaggcggggtcgccaggggatcgagcatagcgctgacggcagatcggtaaagtcgcctatgtcggatttgtcattccggccgaccaacggcagcgacggcgggcaggacctgcgaccgagaaacaccggccaggtcgggtgcagcaatgcgcgtcgggccgcgagcagcaattcgggatcgccctgaagggcgaccagaaaactggcgtcgcacaggtattcccggcgggtgagcatcgccccttgtttggtcttgccttcaccttgagcgatacgcatttccattttcgctcctacggtatggtagtcccaccatcgtacgccgggccggtcgacgcggaccgccatagccagggcgttgagcttcgggagctgttcccttgcggttatcctgggaattcccagggcggagcaaagcaggccgacaacgcccgatttggtcggggcctcgccggtccttcgaatgaggaacttcgactcgtggctgccccaggattgcagcgggccttcgaggcgaagaaagagagtgtttgcgttcatcgtcacgacctccttactttaccgtgacggcctgcacctgtgcccagtcgaagccgacagcccggaccacctcgacgaccagttcgtccagtgacttgaggttgtgattggccagggcaatttcctggttgtcatctatggccgtcaggggatgtcgcagattcggcgagaaccagaatcgcttgtccggcttgccgtagccaacatccaggtcgtggacgtactgcccgagttgggcaatgctctggcagaccatgtcgcgcggccccttgcaggggactgggttagcaaacgcattcgcatagctgatgggggtctgtttgatctcaacaagcatcccatccggcggattgtgggctgcaaaactgttctgctttccggttggattggccagggccgcgccgcgcaggaacgctccgacggtatgggcggaaagttcccggttgtcacgcaggtttatcaccagcgcgt

SEQ ID NO: 877 - DNA, 4047 bp, Artificial Sequence
  Synthetic Oligonucleotide
accgtcgaagcggccctgcaagtagcccacgctatctctacccacgaggcccgccccgaagtcgattactacgttgccgcagacgacatcccgggcgaggatgccggcgccggttatgtggacgaagccatgtacgcctccgcctgtttctataaatacttttccatcgattgggaaacgctggtgaataatctaaatgggttcaaagatggttgcgaaaaactcgccgcccacactgttggggcgttcatccgcggggccgcgctgaccaatccaacaggcaagcaaaacagcttcgccgcacataacccgcccgatggaatactgatcgaactgagaaatacacccatcagctacgccaacgccttcgccaaaccggtcaataaagatgagcgcgatatcgtatcccagagcatcgcccaactcggtcaatacatctgtgatatcgacaccggatacggcaagccggagcaccggttctggttctcgcccaatctccgctacaagctgaccgttttggatgacaagaaggaaaatactcttgccaataacaacctcaaatcgctcgatgaactgatccccgccgtaatcaaaaccctcggctatgactgggaggaggtcaaaaaagtagtcgtaaacccggaggcggcctgatgagcgccaatacactttttcttcgccttgagggcccgatgcaggcatggggcgaccaacaatcgaagttcgttatccggcggacggccgaggcgcccaccaaatcgggcgttattgggatgctctgcgccgccttgggcgttccccgtccgcaggccgctgaaatatggcttccgaaactcgccaaactcgatatgggcgtgcgcatcgaccaacccggcatccgctggtgggattatcacaccgtcggtgccagaatgaaaatgcgcatcgccaagggtgagggtgaaaccaaacccggcgccatgctcagccggcgcgagtatctttgcgatgcctctttcttggtcgccctacaaggagaccccggcctgatcgccgaattggaaaacgccgtcaagacgccgaaatgggtgctttatctcggcagaaaatcatgcgttccctcccgccccctgctggaacatcaatccggtgatttttccgatttgcttggcgcccttacatccatcccttggcgtccgcggctcaaaaatgaccagcctccccaaaccgtggaatgcctgctcgactggcggcctacggccgcacaaccggaggcgcccgacgatgcccttatttggtatgatgttccactgacattcgagccaccttcgcatcagccgcgattcgttatccgcaaaacattgaaggtaggcaaagatggagaattggccgtcatgacggaagctgcccaaaatctccccaagtctcccccgcgcccacgagccaattacggcgacaacgaatacagaaagcgacgagaagaaaggcttgaccacgaccaccatctatgcgtcttctgcaaggcgccggcgacaaccgtgcagcacatcacctaccggcgggccggcggcgatgagaccgcagacgatttgcgttcgctttgccgcctctgtcacgatgccgtaacgatgatcgaatacggcctcaatatgggcatggaccgcatcaatcccgaagagccgcgctggcgcgaaatgatcatcaaaaaacgaaacgatatcatcaaattccgctctcttgaaacccgtcgtcggcgcctcgcctccgaggaggtggaataattatgtatatttccctgctcctgatcgatacaggcgataatcccgacagaccgcggccgggacggatatggctgcgcaatctctatcatgtgcaccaacgtctttgcatggcgttcccttccgactcccgtaaatcggccgacgcgcattttctcaagccgttcaatccggaggagttcggcaaaggccatgtgcatgtaaaccgcgccgaaaattccggttttctttttcgtatcgacccgctgcccaacggtagagccgccattttggtgcagtccgtcatcgaacccgactgggaatatgcctttcacaatgcctgctatcttctggccgccaagccgcattgtcggcctttcgatccccgattcaccagcggacagcgccttcgctttcgcctcgccgcaaatccgaccagacgtctgagcgaaaaatcaccggatgcaaaaagggaatccttccgaaaacgcgtccccgtgccgaccgataaactccccgactggcttgcccgccgggccgattcggccggctttcatatcctcaaattgaactccattcaaaccggatatgtttatttcaaaaagcccggtccggaagcgcgaaaatccccgacgaatcaaatttcttgcgatgacgaccatggatctgacaagcacgataattccgataaagatcagaaatcacgcctgcgtctggcccgttacgaaggcgtccttgaagtcaccgatcctgataaattccgcaaaaccattgtcagcggcctcggttcggccaaggccttcggcttcggcctcctctccgtcgcgccgtatgatggggagtcgtagtgagaatcaaaaacctgcatgccttgcccaaattcagcgacggctggagttatctctatgtgcagcattgccgcatagatcaggaagcacgggccatcgccgttcatgatgaagcgggcaaactgccggtcccctgcgccaatctggccatgttgatgctgggacccggcgtttcgatttcgcacgccgcaatctccgtgctggcggatcacggatgccttgtagcatggtgcggcgaggaaggggtgcgcttctacgcagtcggcatcggcgaaacgcgcagcgcggctaacctcctgcatcaggcgcggctgtgggcgcatgttgacctccacatgcaggtggtccgccgcctataccagttgaggtttcccgagaagctgagcccgcagttgacacttcgccaaatccggggtatggagggcgtccgcgtgcggaacgcctacgccaatgccgcgcgtgaaaccggcgtaacttggtcaggccgcaattaccaacgcgataactggaacaaagcagatccggtcaatcgggcgttgtcggccgccaactcgtgcctgtatggtatctgccatgcggccatcgtatccgcgggcttctcgcccgcactcggcttcatccacaccgggaaaatgctgtcgttcgtctatgacatcgccgatctctataaggctgagatcacgatcccagtggcgtttcgagccgcagccgagggagagggaatgttggagcgacgggttcgcctgacctgccgcgataaattcgtatcgacccggcttctggagagaatcattcccgatatccggacggcgctgatgttgtcaacgccagagccgaccgccgacggcccgcctttcgacgatgacgccgcccccggctcgttgtgggatcccgagggaaaagatgtggccggcggacgcgcctatctgccggaggtcaacgagaaggagaaggagaaagagaaggagaacgagaaggagaaggacgatggtggtgatgattcttgagcgggtgccgccggcattgcggggcgagttgacccgctggctgctggaaccgaaagccggagtctttgtcggccgaccatcggcgatggtgcgcgatatcctttgggagaaggcctgtgggcaggccaaggaaggtggttgtgtgatgatttattcgagtgacaacgaacagggttttcggattcgcagttggggtctgacgtcgcgctccatcgaggacttcgatgggctttttttggtgcgcgtgttgtagtataatagtttattaagtattgtccccacgcacgtgggggtgaacccggatggtcattcgccgataatcggtatgcaaaattgtccccacgcacgtgggggtgaaccgacgatgcaaaacgataaatttgaggcggccgcattgtccccacgcacgtgggggtgaaccgagaacatgtactacaacagatacgcatagcatat

SEQ ID NO: 878 - DNA, 4041 bp, Artificial Sequence
  Synthetic Oligonucleotide
cgagctgacggccgttccggatatggcgcttggcggaagaatgctcgagaccggcgtactcaaggacaccacagtggacgcggcattgcaggtcgcacacgcgatctcgacgcatgaagcacgaccggaagtggactactacgtcgcggccgacgacgtccccggcgaggacgctggcgctgggttcgtggatgaagcgcttttcgcctcggcgtgtttttacaagtacttctcgatccgctgggaaacactgcttgagaacctcaaggacaacaaggaactggccgcgcacacggtcggcgcatttatccgcgcagcggcgacggtcaatccgaggggcaagcagaacagcttcgcggcgcataatcctcccgatggaatgctggtggagatcaagaacgccccgatgagctatgccaacgccttcgccaagcccgtttccctcgatggtgggcgcgacgtcatctctcagagcatagcgcagttggcccagtgcgtccatgacctggatatcgggtacggcaagccggagaagcggttctggttctcgcccaatcttcggcaccagttgaggattgtggacaacaagaaggaaatcgatcttgccgagagcaacatcaaatcgctcgaagagttgattcccgccgtgatcgcggggattggccacgactggaagaaggttcagaaggtcattgtgaatgcaggggtggccgtatgaatgcgaacacgctctttctccggctcgaaggccccctgcaatcatggggcgatcaggaatcgaagttcgttatccggcggacggctgaggcgccgacgaaatcaggggtaagcggattgctctgcgcggcgctgggcgtttcccggcgcgaagcggccgatgggtggcttgagaggctcagtgcgttgcgcatgggggtccggatcgacgcgccgggcgtccggtggtgggactatcacaccgtcggggccgggatggaaatgcgcattgcggaaggagaggggaagaccaagccgggcgcgatgctcacgcggcgcgagtatctttgcgatgccagcttccttgtggcgcttcagggcgaacccggtttcattgcggagctcgaggccgctgtgaaagtgccgaaatggacgttctacctggggagaaagtgctgtccgccgtcgcgcccggtgcatgagcatccggccggcgatttcgcggacttgcttcgggcgctctcgtccgtcgactggcgtccaaggcttgagggagatgaaccgccgcaggccgtggaatgtctcttggactgggagccgacgtccgagcaaacggaggcgcccgcggatgccgtcgtgtggtatgacgtgccgctaaggtttgagcctccggcccacgacgctcgatttgtaatacgccgtcagctccgaccgggcgtggaaggggaagtcggcatctctaaaaagcccgcccagaccgcgacgccacgacctccccgcccgagagccgactatggcaactccgagtacaagacgcgccgccaacaacggctggactccgaccacggcttatgcgtcttctgcaagtctccggccacgacggtgcaacacattacctatcggcgcgccggcggcgacgagataccagaggacctccgctcgctctgccgactctgccacgacgcggtgaccatgatcgagtacggcttgggcatgggcctggatcgcatcaacccggaggatactcgctggcgcgggcaagtcatcaggaagcgcgatgagatcatcgagtttcggtcgctggaggctcgtcggcgaaggctcagtcccgaggaggtggagtaaccatgtacctgtccatccttctcatcaacgtgggtaccgacccggatcgcccgcggcccggtcgtctctggctgcggaacctctatcacgtccaccagcggctttgcatggcgtttccgtcggcgtccagagtatccgacgatgtggactttctcaagcccttcaagccggaggactttggctcgaagcaagttcatgtcgctcgtgggacggacgccgggttcctgtttcgcatcgacccgcgaccaggcggacgggtcgtgattctcgtgcagtccgccgtgaagcccaactgggactacgccttccgcaacgccgattatcttctggcggctcctccggaggtgaagccattcaagccgcacttcaagccaaaccagcgcctgcggtttcgcgtccttgccaaccccgtgagaaaagtgagccggaattccctcgacaccaagggcgaacgcctcgacaagcggtggataggcaaagacgttcccgtgcctacggccgacctgacgaagtggctggaacgccgcgccgagccgggctggtcggtacccaagaactcggacggcaaacaatctccgcccggtttccgcctcgttgaaatcaccgagatccaaggcggatacgtctacatcaaaaagacctctgacaagaacgccggccgccgcgtgcgttccgcgctctacgagggcatcctcgaagttaccaatgccgatcatttcctcaatacgctcgtcggcggtatcggccccggtaaggccttcggcttcggcctcttgagcgtcgcgagggcataatggctaagaatctacatatcctgcccaagttctccgaccgctggagttatctctaccttgagcacggaaggctcgacaaggaccagcagtccctcgcgttccatgctcctgaaggctcaacccacatccccatcgaccagctgggttttctcatgcttggcccgggcacaatggtgacccatgctgcgatgaaggtactcgctgagaacaattgcctcgtggcctggacgggcgaggaaggcgtacgcctttatgcgcactcgacgggaggaacgcaccattcgcgccggctcctgcggcaggcggcgctcttctcggacgagacctcgaggatgcaggtcattcgcaggatgtacgagaagcgcttccccgacaaactcccgcccgatgcgacgattgaacaggtccgcgccatggaaggggcgcgcgtgcggaaggcatatcaggaaatatccgcccagacgggcgtcccttgggcagcgcgagactacgaccaagaccagtgggtcactgccgaccctcctaaccgcgcgctctcggcggccaactcgtgcctttacgggatatgccacgcggcgatactgtcggccgggtactcgcctgccttgggtttcattcacgtcggcaagatgctcagcttcgtatacgatatcgctgacctgtacaaaaccgagttgacgctccccattgctttcaaagtcgtcaaagaagggctcggcgacttcgaacggcgttcgcgcatcgcctgtcgcgacgcattccacgacagcaggctcatggagcggatacttccggacattgcggaggtgctcgatgctcgtgatgatcttggagagagtcccggcgagcttgaagggcgaattatctcgctggctgatagagccgcggtcgggcgtattccttgggaacccgagcgcccgggtgagggacgaactgtggcggatggcggcggccaagagtaagcagggcagcgtagtccagatatggagcgaccgaaacccccaggggtacagttgccgttgtcatggtcgcgccgcgagggagctcgtcgatttcgaaggcttggcgcttgtccggattcccgccgaagagtgacccgcatcgggaaggcgttccgcaaagaacgccccgctctttgacaactggtcatgttgagtgggaaagaacgaggcgtttgcagcctcggtgttgtgccagtcagggtcaagatgtacgatatgttggtgtcttccccacgcacgtgggggtgaaccgcaagcatgtccgaaaaacatgctttcactgaagtcttccccacgcacgtgggggtgaaccgaatgcccaggcgcaaatcctttgctccttcgagtcttccccacgcacgtgggggtgaaccgcctggccgctggggggaacggctcgaaccctagtcttccccacgcacgtg

SEQ ID NO: 879 - DNA, 4023 bp, Artificial Sequence
  Synthetic Oligonucleotide
gctcgtggccaagcttttcggcgcgttccgggtcccgcacatccggcccgattcaggcgcggggccttctttgcctgaagtcctgggctgctgtgaaccgcatgacgaagatgatcgccggcgattccgtgaccgcttcgatgctttgctttgctcctccctgtcgtctttggagccgcatttgcgctgggcgatgggagaggccgcccgggctgttgccgggcatgtgccgcatgcgcggaatgtgaagggcatcgactgggtacaactcctcgacgatctctccatttgggatcgtggcaaggcgcatcgccgcaggcgtgatgtgcgcgacatctgggccgaaacgtatctcaacacgactgattcaaaagaaaggagagcatagatatgctgatcgaaatccacataatccagaatcacagcccggcgaacctgaaccgggacgaccttggcgcacccaagacctgcatcttcggcggtgttagccgggcgcgcatctccagccagtgcctcaaacgcagcatccgacgcagccctgagttcgcggccgctctggaagaagacggtggcgtccgtacacggcggctgatcgatctgatcgcaagggaggcggcggggacaaacgagcaacggtatgagcaacattgcaagaccattcgacaagtctttgaaaaaggtggggtcagtataaagaaggatgagaacactttcgacatactcttctttctgcctcgatccgccatccaggaaatgggcgatgccgttcgccaaggaggccaagatctcgggaacaaattcgccgagatcatgagcaggtttgtcaagacccccgacattgcactttgtggccgtatgacagagttcgatgcaaagggaccgtttgacaaacttaaaggtcggtttaccgtcgaagcggcactctccgccgctcatgcgatttcgactcacgcgatcgtgaacgaggtggactactttactgctgccgatgacgtgcccggcccggacgccggagcggcccacgtcaacgaagccatgtttaactcggcctgcttctacaaacacttcgtcatcgactttgatcagttgaagaagaacctggcaggcgatgccgaccttgcctgcaagacagtggactgcttcctcaaagcggccaccaagaccaacccctccggcaaacagcacgcatttgcggcattcaatctgccggatggaattttggtcgaagtgaaaaccaagtcgccaacacccgtcagctatgccaatgccttcgctgatccggtgccggaaaagcctgaacgcggcttgatcggcgaaagcatcgccagacttggccagtacgcccacgatctggctgcgggctatggaatcgaggccgaacgtttctggttctcgccgaatctgcgctatcggctgacctgggtcgacaagagcagcaaggaacacgttcaagaaaagtccgtggtcgatggcaacgagttcggtgagttcgatacattcgtccaaaagatcatcgaaaaagtgggggcaaccgaaacccttgcggaggcagaaaaatgaccgaagcgaacactctcttcctccgcctggaaggccccctccaggcctggggcgacacgtctaaatttgtcatccggcgaaccatggaggcgccgaccaagtccggcgtgctgggtctcatctgctgcgccataggtctgacgcgtcaggaggcccgcaaacatctaccggagctgaacaggcttgcgatgggcgtccgcatcgaccggcgcggcacgcggtggtgggattaccacacggtcggagcaggaatcggcatgaccaccgccgggggcggtgaaaagaccggagcacagggcacgctcatcacgcgtcgggagtacctggccgacgcgagctttctcgtcgcgctccaaggtgatgcggacttgatccagaagatctccaatgcgctggcgtcgccgaagtggccgatttaccttggccgcaagtcctgcaccccttctgtcccaattcttgaaacgccccgcaagggagatttgtgggccaatcccgccagccatggcgacctgaacgctgcgctgtgcgccgtcccgtggcgcccccggtacaaggacgactcgatacctaacaacgggaggacggaaacaattgtggaatggcggcccgccacagaaaatgatgtcgctcccgagaatgcggaagtgtggtatgacgtgccggtatgcttcgaaccaccggtccacgagccgcgattggtcctgcgcgggaccgtttcgccgctgctcggggaggggatgcaggagcctctccccgatccaccgcgcccgcgtgcgaactaccaaaatgcagaataccagaagcgccgcaaagaacgaattcaagccgacgccgggttgtgcgtcttctgcaagtcccccggcccgcgcatgaccgttcagcatgtcacgtaccgaagagccggaggcgacgaaaccctggaagacctgcgttcgctttgcggcctgtgccatgatgccgttaccatgctcgaatacggcctcggaatggggctggaccgcatcaatcccgaggaaccccgctggcgggataaaatcattcaaaaacggaccgagattctcaagtaccgctcgctggagattaggcgccggcttcttgccgccgaggaggtggaataaccatgtacctgtcctgtttattgatcaacgtaggcgacaaccccgaccgaccgcggcctgggcggttgtggctgaggaaccgctatcatgtccaccagcgtctttgtatggcctttccgtccgcgtcccgcaaaatcgacgatgtgcacttcctcaaaccattcaaaccggatgagtttggcaacggtcaaatccacgtggcacgcacggtggactcaggctttcttttccgtattgaccctctccccagcggccgggcagcgatcatcgtgcagtccgccctcaaacccgactgggactatgcctttcacaatgcaatgtatcttctggcagggcccccggaggtgaaacgatttgagccgcacttccggccaaaccagtggcttcgatttcgcctcgcggcaaatccgacccgacgtctgagcaagcattcgcccgatgcaaaaaaagagtctgtcggaaagcgtgttcctgttccgactgagaaactgattgactggcttgcccgccgggccgaatcagcagggtttttgatcaagcaagagaccgtaacccttcagctcggctatatctatatgaacaaacacgacaaggggcagcgtctgcgctcggtccttttcgacggtctccttcaggtcacggatccggatgcctttcgacaaacactgatccgcggcattggttccggcaaggccttcgggttcggcctgctttcggtagcaccggtccagaccgcggacgcgggggaggcgacatgagagttcgggacctgcacgttctgccaaagttcggtgacggctggagctacctctacgtcgagcattgccgcgtcgaccaggacgaacgggcgattgccatccacgatgactccggcaaggtgccggtcccctgcgccaatctggcgctgcttatgttaggaccgggcgtctcgatcacacatgccgccatttcggtgctggcggaccatggttgtctggtggtttggtgcggcgaacagggagttcgattgtacgcgtcgggcatgggcgagacaaggagcgccgcgaacttcctgcatcaggtgcgggcttgggcggacgcggaccttcactggaaagtcgtgcgccgtttgtaccaattgcggtttaccgaaaccctcgatcctggactgaccctgcgccagatccgcgggatggaaggcgttcgtgtccgggatgcttatgccaaagccgcccgggaaaccggggtgccttggtcaggccgcacgtaccggcgcgacaagtggaccgatgcggacccggtaaacagagctttgtcggcagccaatgcgtgtctttacggcctctgccatacggcgattatctcg

SEQ ID NO: 880 - DNA, 4005 bp, Artificial Sequence
  Synthetic Oligonucleotide
cccagttgctgcggtcatagttgcggcctgaccaggcgatgctggtttcgcggctcaggcgggcgtaggcggccctgacacgcgaaccctcgatgccgcgaagctgctcgatggtggtatcgggcggcaggtcctcttggaaacgcattcggtacatgcgcgcgacgacctggagacgcagcttgtcgtcggttgcgagccgtgcctgatggagcagggccgcggagctgcgggtgccacccatgccggaggcgtagaagcggacgttctcctcgccgcaccacacgacgaggcagttgttgtccgcgagcgcgcggatggcggcatgggtgacggcggtgcccgggccgagcatgagcacggcgagcgaggcaatcggcaccggcaccttcccttgggcgtcatggaaggcgatggtcttctcgtgctggtctatgcggccatgctccaggtacaggtaagacaggcagtctcggaacttgggcaagcgatgcaggtcgtccacggccccctcccgtcgttcatggtgcgcctgtctgtattgttccgcacttcccggctgcttgcggggcatgtagcctgtattcagttgtcaaggtgcaggcgctggatcggtgttctacgacaccggcgccacggatagcaggccgaagccgaaggccttggcgggaccgatgccgcggacaagggcgttcttgaaggtcgccgggtcggtcaccgtaagtgtcccttcatagcggaccgagcgacggcggccgctgttcggcttcttcccgtcatcatgtgacccgtctccattcggcttcttcacatagacgtagcccggttgaatgctaacggcatcctgctctacgaggaacccggcgagcgcagctcgccgagcaagccattcgtgcaattgctcgggccgcaccggaacccgtgacccattgcggccctctttcttggcttgtcgttcatccttggagagcgtgccgatcttcttggtgggattggcaacgagacgaaaccgcaagcgctggttgacttggaagctcgggtggaactgctttgcctgaggggcgcaagccagaagataaccggcgttgcggaaggcgtactcccaatccggcctgaccgcggactgcacgacgatcacggcccgaccgccgggcttagggtcaatgcgaaacaggaagcccgcgtgtgatccccggacgacgtggacctgtccggccccaaagtgctgcgggtcgaaaggctctaggaagtccgcatcatcggcccttctgggcgccgacggaaacgccatgcacaggcgctggtggacgtggtagatgttgcgcagccagagccgcccggggcgtgggcggtcagggttgtccccaacgtcaatcaagaggcaagagaggtacatggctattccacctcctcagcgctgaggcgccgacggcgagtctcaagggagcgaaagcggatgatctcctcgcgcttcgcgatgatttgcccgcgccaacgagcttcgcacgggttgatgcggtccagacccatgcccaggccgtactcgatcatcgtcaccgcgtcgtggcagaggcggcagagcgagcgcaggtcgtccccggtctcgcctccgccggcgcggcgataggtgacatgctgcaccgtcgcggctggagctttgcagaagacacaaaggccccaatccgcgtgtaggcgggctgcgcgggcattgcggtactcggtgttccggtagtccgcgcgtgggcgcggcggagccggagcaggactctgcgcgggcttttcggcgatctggacctcgccatccgcgcccacgcgcaattgccgtcggatgacaaagcgggggccgtgcgccggcggctcaaaggtgagcggcacgtcgtaccagacaagcgcatcgtcgggcgcttcgggctgttcggacgtcggcccccagtcgagtaggcaatccacggtttctggtggacagtcttctctgagccgccgccgccacggcaccgacgtgagtgccgagagcaagtctggaaacgcgcccgccggatgttccagcagtgggcgagacggggggcagcatttcctcccgaggtagagcgtccattgtggatttcccatcgccgtttcgagttcagcaatcagcgtcggctcgccgcgcagggcgacgagaaacgacgcgtcgcacaggtactctcggcgggtcagcattgcgccgggctttgtctttccctcgccttccgcaatccgcatctgcattccggcgccgacggtgtgatagtcccaccaccgcgtgccggggcggtcgaggcggacgcccatgcgcaaagccccaagccttggcagcgactcctcggcggccttggctcgggaaacgcctaatgccgcgcagagcatcccaatcacgcccgatcttgtcggcgcctcggccgtccgccggatgacgagctttgactcctgatcgccccacgcctgaaacggaccttcgaggcgcaggaagagggtgtcgtaactcatgatacggcctctgagttcgcaacgaccgtctgcaccgctttccaatcatggccgatggcggcgacgacggcggggaccagctcgtcgagcgacctgatgttgttatcggcaagctcgatctcccgcttatcctcgacaacactcaaccggaaccgcagattgggcgagaaccagaaccggttctgcggcttgccgtatccgatgtccagatcataaacgtattgcgccagttgcgcgacgctctgcgagaccatgtcccgctcgcccttgctcggcacggggctcgcgaaggcattggcgtagctgatcggagtgtgcttgatctcaatcagcattccgtcggggggattgtgcgcggcgcagctgttctgcttgcccgtgggattcgcaagggccgcaccgcgaaggaacgcgccgaccgtgtgggcggccagctcttcgtggttctcgccatagccctttaggttctcgaccaacgttccccagttgatcgagaaatacttgtagaagcaggcggaggcgaacattgcctcgtccagatagccggctcccgcatcgtcgccgggaatgtcgtctgcggccacatagtagtccacttccgggcgggcctcgtgcgtcgagatcgcgtgcgccacttgcagcgcggcgtccaccgtggtgtcgagtcccttccacacatccttggaggccttgtcgggctccagcatacgccctgacagcgctatatccggcacggccactcgcttgccgatgagtctcgcgaactcaagcgctaggtgctcatcggtcttcgctttgctgccctgaagaagctttgccatctcctgaatcgcttggcgtgttgtgtacacaagcatcttgctcttgtctgaatcgccgagatcatcttcctcggcgttctgcttcttcgtcttgggctcgaatccgcaagcctggaggatcttctccgcacgcttctgcgcgtcgggcttgccggtgacttccgccgcaatcagcttcgccaactgccgagtgcggacgccgccgagcaatgccttgaactgctcgctcatgcggatgcttcgcttgaggcactggctggagatgcgggagcgcagaatgccgccaaagaagcaggtctttggcgcgcccaggtcgtctctgttcagattcgacgggctgtggttctgaatagcgtgaatctcgatcagcatgactgtcccctttcgttgtgcccgatgaactcataggcccacctggtgcgcatggattcgcgttcccagatggagagatcgtccgtcaatcttacccagtcgagttctcgacctgttgacgcgattaagccaagcgcccatcgtagcgcaggctcgatcttgtcgaggggcaggacgagcatcctgtcgaacctttgcgggaaacgctttctcgctaggtcattggtgggctggcaccgacgtagctggcgggcaagcgtgtcatcgggcgactgcggaatcggacggaaggcgtagagcttcgcag

SEQ ID NO: 881 - DNA, 3962 bp, Artificial Sequence
  Synthetic Oligonucleotide
accaagaggaagagctgatgaacccgacgccgaccgagatttatgtcagccgattaactgccctcaagaccggtgaattggccatgttacgaagccacaccggacaggggatcgaccggtcagtcgcagcattcgatctcttttccgggatctggtggccattgcgcgagaagaaccagcgtgcgccacgacgccaggtcgcctggctcgttgccaaacttttcgcttcctgcccggtcgaccatgctccccatcacccgctgccatcccaactcagccgctgccggattcaggatgagcggcaagacagaaggctcgcgcagaagtttgacgatctcctgatgcaacccctgatcgacattgagaatcctctgcgctgggcgatcggcgtggttgaatcgcacaacctgaaactggattgggttcgcctgaccgacgatctctcaatctgggatcgtgaaacaacccggctcagatgggccggccaattcctcgacagcaacgaagggagtggtctatgttaatcgaaatccatgcgatccagaatcacagcccggccaacctgaaccgggatgatatcaacgccccgaagacatgttacttcggcggtgtgctccgctcgcgcatctcaagccaatgcatcaaacgaagcattcgcatgagcgatcagttccgccaactccttggcggcgtgcgcacccgacaattggcacgtttaatcgccgagaatctgcctcccaattccgactcgagaacccgcgcggccactattctcaagggttgtggcatcggcgccaaaaaggaggatcgcagcgatatgctggtctacacgacacgctcggcgatccgcgagatgagtgatcttctgcagaataccaacggtcggacggatgaggaactctcccgcgatttcggacgcatcatagcggaacgaacagccgttccagatatggccctgacggggcgcatgcttgagaccggcgtcctcgataacaccaccgttgaggccgctcttcaggttgcccatgccttctccacgcatgaggcccgtcccgaggtcgactactatgtggctgccgatgacattccgggcgatgatgctggcgccggctatgtagacgaggccggtttcgcatccgcctgcttctacaagtacttctcggtccactgggaaaagctcgtagagaacctgcgtgggaattccgaattggccgctcatactctgggagcttttatccatgctgccgcgctggccaatcccactggcaaacagaacagcttcgccgctcacaatccccctgatgggatgctcgttgagttcagggccacacccctcagctatgccaacgcctttgcacaacccgtcacggcccaaggggaacgccacctgatttcgcaaagcatcgcagagttggccaagtacgcccgcgatctcgatatcgggttcggtcgaccccaggttcgattctggttttctcccaaccaccgctacccatttgtcgtggctgagggaaaagaatctagcaccctggccgaacataacccgctttcattacaggacctcattgcagccgtcgtcttggccaaaccaatcggcctccattggggaaaggttcagaaggtaattttaaccgatgaggtgcccgcatgagtccggcgactttattccttcgcctggagggaccgcttcaggcttggggtaatcacgaatcgaaattcagtgtgcgtcgcacctacgaagcacccacaaaatcaggcgtcctggggatggcttgcgctgccttgggcatcccccgtcgtgccgcggccgccgaatggcttccgcaactctccaacctcagcatgggggtccgaatcgattctcccggagtgcggtggtgggattttcatacggtcggcgctgacatgtccatgcgcattgccgaaggcgaggggaaggcgcgcgaaggcgccatgctcacccgccgtgagtacctctgcgatgccagctttcttgttgcacttcagggagaagactcgcttgtggacatgcttcgctcggccttttgtgagcccaaatggccgctttatctcggccgcaaatcctgttgtctctcgcgccccattctcgaacacaacggcggcgttcatgaatcgcttctcaccgcgctggcctcagttccctggcgtcctcgtctgaagggcgatccgtctccgagtgccgttgatgccctgctggactggttgcctacgccagatcaactcgaggcaccggccgacgccttggtctggtacgatgttccgctgacttttgaacctccatcacaccggccacgattcgttgtgcgcgagtccctcaccgttggcccggagggtcttgttcaactggccgaatcacccgctcaacgacccgctccggctcctccgcgcccccgcgccgactatggcaactctgagtaccgtcgcaagcgtctggcgcgtctcgatcaggatcaccacctctgcgtcttctgcaaggctcccgccaccactgtacagcatgtcacctatcgtcatgccggcggagacgagtcgctggacgatctgcggtcgctttgccgtctttgtcacgacgccgtcacgatgatcgaatatggtctcgggatgggccttgatcggatcgaccccaagcagccatgctggcgcgatcagatcctcgaaaagcgcggcgagatcatacgctttcgctcgctgcaaactcgtcgccgtcaccttgccgccgaggaggtcgaatgatgtttctttcccatctcatgatcgacgttggcataaaccccgaccgtccgcgtccaggaaggctatggcttcgcaacccctatcatatccatcaacgcctctccatggcgttcccttcggaagatcaggtcaaccaggatcctcatttcctcgccccctatcagcgccagaacttcgaccaggtccggttcctgtttcgcgtcgataacagcattgaggctgaatgcccccgggccatcattctcgttcaatccgaggcaaaaccggactgggactatgcctttcataacgcccgcatgttccttgcggccgatcctgccgtccgtgagtacaacccgcgattcaattctggagattgttgccgctttcgcattcgtgccaacctgagcaagaagagcatggcgcatcgtcgcgtgctcacgaccgtcgataccaccggccggccccagtcccagggcaaacgcgttgccctcacgtgggacagcgaccaggaccccaacgacgtgataggccaatggtttgccgggaaaatgagcggtcgtggctgcgagatgaccgactgtcgactgctacacatgggctgggtgaaggccttccaacgccgctcccgcccctctgactcgatcgctggagatgggaaatgtgagcgccagatgaagttcctttccggactgcttgagggaactctccgtgtcagtgagcccgatctgttccaaagaacgatcacttcaggcgtcggctccgcaaaggcattcggctttggtctgctcactgtcgtccaggcatgagcgggcctctcgcctgaatcgagtgcgtccatctccccatgcgcctgcaggacctccacgaactgcccaagatccgcgacagcctcggctatctgtacgtcgagcattgtcgcatcgaccgcgaggacaaggccatcgccatccatgatgccacggggctcaccccggtcccctgcgcctcgctcgcgctcctgatgctcggccccggtgtcaagatcacccatgccgccatcctgaccctcgccgataccggctgcctcgtcgcgtgggtcggcgaggaaagcgtccggttctacgccgccggcaccggcgagacgcgcagcgcatcgcgcctcctccaccaggctcggctcgccacgcgccgttcgacccgccttcaggtcgtccgccggctctatgaaatgcgtttcggtgaggagc

SEQ ID NO: 882 - DNA, 3950 bp, Artificial Sequence
  Synthetic Oligonucleotide
aactttacgccttccgaccgttagaacacttacctggccagacgcttgcccgccagcttgcggcgtgccggcgggacaacgacccggagaatgaccctgtcgcgcaaaggttcgacggcatcttgaccctcccgattcatagtatcgagcccgctctgcaatgggcgcttgccctcatcgcctccaaagacccgaagctcgactgggtgaggctgacaaacgatctttccatttgggaacgcgaaaccacgcggctcaagtgggcagaggaatttttgaagccttcaaaggaggaccgtcatgttaattgagattcacaccattcaaaaccacagcccggccaacctgaaccgggacgacttgggcgcgcccaagacctgctatttcggaggggtattacgctcccgcatctccagccagtgcctgaagcggagcatccgcatgagctacgaattcaagcagttactcggcgggatccgcacacggcaattggcgaaattgatctccgaaaaggtgaccggaaaaggtgccgcgagtaaacgcgcggcaaagattctcgagaagtgtggtatcaatccccggagcgaagaagacgccaggagcgacatgcttgtttacacgacccacgaggcgattgcggagatgggcgtactcctccaggacggcgacggaaaaaccgatgagaaactggcagaggaatttgggaaactcataagtgaacgcgtcgccgtgccggacatggcgctcgctggcaggatgcttgagaccggggtgctcaaaggcacgactgtcgaggcggcgcttcaagttgcccacgcgatatccacccacgaggctcgcccggaagttgactactacgtcgccgccgatgatgtacccggcgaagatgcgggcgctggttacgtcgacgaggcattgtttggttccgcttgtttctacaaatacttctcgatcaactggcaaacgctggtcaaaaacctgaaggcctacggtgcgaaccacaaaaacttggcggcgcacaccgtcggcgcattcattcgcggagccgcgttggtgaatcccacgggcaagcagaacagcttcgccgcgcacaatccccccgatggggtgctagtggaaattagaaacaccccgatcagctatgccaatgcctttgccaaaccagtgactcaagaccaacgagacatcgtatcccagagcatcgcgcaacttgggcagtacgtccacgatttggacaccgggtacggcaacccggcaaagcgcttctggttctctcccaatctacgctatccgttgacagtctgcgtcaaggagaacgaaaacggaaaggagaaactgcgcgagatcgtgctcacggataacaatatcaggtcgctcgacgcgttgatccaggcggtgatcgaggagattggctgtgactgggaggaggttcggaaggtggttgtgaactcggaggtggcctgatgagcgcaaacaccctctttcttcgcctcgaaggtccccttcaggcatggggcgatcagcagtcgaagtttgtgattcggcggactggtaacgccccaaccaagtcgggtgtgattgggatgctttgcgcggcattgggcgtctcccgccctgcggcccccgaaggctggcttccaagacttaaccccctgcgcatgggcgtccgcatcgatgtccccggagtccgctggtgggattaccacacgctgggggcaggcatgcggatgcgcacggccgaaggcggaaccaagcccggggccatgctcacccgccgcgaatacctgtgcgatgcatcctttctcgtcgctcttcgcggcgacccgcctctggtagccgaactggaggcagcaatcaaagcgcccaaatggacgccctacctcggcagaaaatgctgcccgccttcccggcctttgctggagatcccccccactggggactttccagacctcctttcagccctcacgtcggtcccttggcgcaaacggctggagggagaccagcggccgcaagccctcgattgcctgctggattgggagccaacacccgaccaatcagaagcccccgatgatgctctggtctggtacgacgtgccggtgacattcgacccgccgtcgcaccaaccccgattcgttgttcggacgcaactgcgcgtcggcgacggcgggcaactaacgctcgcgccccagccagggcagagcgacacgccgccgccgccccgccccagagcggattacaccaacactgagtacaaaaagcggcggaaggagcggctcgacaacgactatcatctatgcgtgttttgcaagtctccggccacgaccgtgcaacatgtaacgtaccgtaatgcaggcggcgctgaacacatcggtgagttgcgctccctctgccgcctctgccacgatgccgtgaccatgatcgaatacggcctgggcatgggcctggaccgcatcaaccccgaagagccgtgttggcgcgacttgatcatccagaagcgggacgagatcatcaagttccgctccctggaaacccgccgcagacgccttgccgctgaggaggtcgaatagccatgtacctgtcctgcctcctgtttgatgtcgggagcaaccccgaccggccccggcccgggcgactctggctgcgaaacctttatcacgtccaccagcgcctttgcatggccttcccgtcggcatcccgaaaatccggtgaccgtgacttcctccagccctacaaacccgaggactttggggagaagcaagttcatgtagaacgcggcgcggattcaggctttcttttccggatcgacccgcaaccgggtgggcgggtcgtgattctggtccagtccaactccgccgtgaagcctgactgggactacgccttccacaacgcccgttttcttctgaatcctctggccgctccccctcaggtggaggaattcgacccccgcttcgcgaagggccaacggcttcgcttccgtatccgcgtcaatctgagcaagaaggtaaaaaccagcaccaacggagttgatcttacgaggacgcgagaggggacagataagcagggtcgcccgaaggcccaaagcaagcgcgtggcgctgacctgggataaggaccagaaccccgacgatgtgatacgagaatggttcgccgccaagggcgaccaaggtggcttccaggtggaagctttccgcgtcttgcaaatcgggtggggcgcagggaaccgatcggactcgaggccggcgggcgatcgcatgaaatttcgctcagccttattggaggggacgcttacggttaaagacgcggatagctttagagaaaccatcgtgggcggcattgggcacggcaaagccttcggcttcgggcttctttccctagccccttgccgcacaccactcccgacagaggcaacgtgagagccatttggcgaggcgagctcgccgctacggcgtcaaattgacccactacccgttgtcctgccaacctgactgtgaaaagggaaactctagcgccgcgtggaaggaaattgattttgtggcaatgcgctaggatgggttcattaggactagagtgaggcatggcggaagaagcccgggtccgtgtgagccagaatggccgcgttgttatcccggctcccttccgtaggacgctgggcatcaaggtgggggatgaagtcctcctgcggatccaagacgacgaactacgaatcacgacccagcggcggcgcatccagcgcgcgcaacgccgcgcccgacgctacctgaagcccggcacttccctggtggatgagttgctgacggagcggcgtcggcgcccagccggttagctttggcgacggcaaaagcagcggcccggaccaacgccagttcgccgtccgccgcatcaaacttgttccccgcgcctctcctcaatgagaaggggacgaaggggtggtgctgatttttggcatcaagc

SEQ ID NO: 883 - DNA, 3946 bp, Artificial Sequence
  Synthetic Oligonucleotide
agcgatacggttcacccccacatgcatggggaatacttatcgtgtcggtattaatcgtctctgggtcgcggttcacccccacatgcatggggaatacatctcaagcagccaaaacagcgcaaccaagttcggttcacccccacatgcatggggaatacacttgatcaatagaggtctaagaggtcattgaactccttcaagccttagtttaaggatgcttggtcataagtttgataccctcccattccgtaacgactcttgatgcggcaccccagaattcgatatcaaacccttgctcggtctgactactccagatcatcaggcaagttccaccgctgcaattgcttctaaccttatcccacagtttatctctaaccattgctgagactttacccacaaacaccccggcttttacttccagcagccaacgtgtgatcttacccctcagggagcttggcacattttccaatactaaaaccaccatcaatcttcctttggcagatcatcctgcccgtaagatatgccgcctggggaaacttctccatctggagaccagagtcctccaggcaaggctggttcttcggcaaaacagtcatccgggctatcctctggcataatatcaccgaagagagaactaatatccgcgacaatgcgtttgagtagattctgcctgtggaattcatcacggcaggcaagcctgactctgcggtcgagttcgccgatcccttcagcggtcgcccggaatgcggcgggagcagccatttccattttgtatagatccgcgatatcatagacaaatgacagttgcttgccagtgtggacaaagcccaatccgggagagaatcctgcagcaacaatggcagcgtgcgatatgccgtagaggcaggagtttgccacagataatgcccggtttatgggatccgctttattccagttgtctctttgatagtttctgccctgcatgggcacaccatacttttgggagagttggaaatatgtatcgcgcacccgggcaccttccttgcccctgatctggttcaaagttaaatcaggagaaagctcatcctggaacctcaactgatacatggagcgcacaacccgtaaatgcaaaaccgggtctgcccagtactttgcctgtttcataagattgacggcgctacgggttgtacctgtgcctgcggcatagaacctgacgccatgttcccccacccaggctaccagacagccacaggcagccagtgaaagtattgccgcatgggtgatggttatgcccggtcccagcatcagcatagccaagccggcacaaggaaccggggtttctcccagggcatcgtgaatggcgatggcttgcccgttctgatcaattttggcatgctccacatagagatagctaagccgatctctgatccgggggatagagtgcaggtctttattcatcattcctgattggcagaacggacagcaggccaaagccgaagcttttcgcttttccaatgccgcttctaagcgtttccaggaacagtttcgggtcatccactttgagaattccctccagtagagccgaacggaagcgcagaggattgtatgtgtgttcacgccagtagccctgtccctgttcctttgctttgacatttttaggttcaggcttggagccataaacccaacccagttgaagaagctcacagcgctgaagggtgaagcccagctttgggcttttggcagccagccagtcggcaagggcctgatccggggtggaagagggatcccaggtgagagaaacccttttgtgcaggatgttgccagtttctatggtttgaccgtcctgttgcaccttctcaggaatatgacggcgtacgctggcgtttacccgcagcctgaaccggagcagttgtcccgcttgaaactctggattatactcctttgtttccggtggcgctgccaggaaatcaagcgcgttttggaagcaataatcccaatccggctcaagaacggactggacgataataatcgcccttttatcgtttccgtcgatgttgttatcgacccggaaaaggaagggagttttttggaagtcgtttggcgaaaagggcttcaggaaatgcggatcctgctcccggcgcaaacctgaagggaacgccatggaaaggcggcggtggacgttatagatattgtccagccactttctgccggggcggggacggtctggattgcctccagtatcgatcaatagcttggacaagtagatcatccgttttcctcctctggcttcattttgcggaaacgctgcccgcgcgaacggaactcgactatatctttgcgctttgccagtattcgctcccgccatatggggtcgcaggggtcgatgcggtcggtggtcatgccggaaccgtattccagcatggtgcaggcgtcgtggcagaggcggcacagcgcccgcaggtcttccggtatttccttgcctcccgccctgcggtaattcacgtgttgaacagtcgtggcgggagctttgcataccatgcacgcggcatggtccatcacaagccgctccgccctgaccttcttatactcggaattgttataatccgcccgggttcctttgggcctccaaacgctggttccggtttccctgctcacttgcacatcctctcccacaaccagctcacgcctgatcacgaagcgcggcaaatggcggggcggctgaaaagaaaccggcagatcgtaatgaatctccgcgtcatcaggcgcatgttctccgtcctggctggggatccagtccatgacgcaaggcagtatttgcggcaggggttcattgtgccagcgcttttgcaggggaaccgcggacagcgcctcctccaaagtgttataaaagcccggagcatgctcgcccacgggacgtgaagggggacaggatttgcgccccagataaattgcccagaccggcttggccagagcggcggagagcttttccacaagttccggctcaccctgcaaggcgaccagaaaactggcgtcggcaagatattcgcggcgtgagagcaaggtctctgccctggtttttactttgcttggtgtcagggtatcagccagggcagctccaaccatggaaggttttttgggtgccttcagctctgccatgcgcattctttgtcccgctccaacagtatggaagtcccaccagcgtatgccggggcggtctatccgcacgcccatgcgcaggttggcgagttttgggagccatgaatcagcagcctccgcgcgcccaattcccatggccgcacaaagcagccccaggacacctgattttgtgggagcgtcggcagttctgcgcaaagcaaacttagcctcgttgctgccccaggactgcaaagccccctccaagcgcaagaataaggtgttgggtggcgcactcatgtcagccgccaacataagccttgcttttctgaacttcttcccacttgaagccgccaatataatccaacacagcgcctacaagctcattgaggttgccaatgttcctggaagccagtttggaatgcttatagccaaggggatagcgattgtttggagaaaaccagaagccgataactggggattgctcatcataatagccaagcctgatgtcgttcacgtagttggaaagctggccgatgctttgttccaccaggtccgattccttgaccacggaaactggcctgacgaatgcgttggcgtagctaataggggaattcttgaactcaacaaggatgccatcgggatagttatgagcggcgaagctgttctgtttgccactggggttggttttggcagcagcgaggagaaaggcacccacggtgtgggctgccagattcgtgtcccctttcaggttcttgaccaactgttcccaatcaatggagaagtatttgtagaaacaggctgaggcaaacatggattcgccaatatgacccgc

SEQ ID NO: 884 - DNA, 3941 bp, Artificial Sequence
  Synthetic Oligonucleotide
cgaagtcttcgccgacaacggttcacccccacgtgcgtggggacaatctttacgtccatcacagcaccagaatcgatctcggttcacccccacgtgcgtggggacaatctttagcaaggtgtttaagcccccggcttacgcggttcacccccacgtgcgtggggacaatactaaaaaaagcctgtaattacggcacacggacaagaaaaagcccttcgaagtcttcgaccgaccgcgccatctctccccaactacgaaaccgaaaaccctgctcattgtcgctcgaatgaatcatcaaacatcctcctcccttggattggtcgcaggctttctcccaaagtctttcgcgtaccatggctgaaaccctacccacaaagacacccgctttcggttccagaaaccaccttgtcaattcaccccgtaacccaggcggcacacgctcaagaatcagaaccaccatcgttagactccatttcatctgtttccaacggataggcgtacccgccctgcacttctcctgtcgcagggtcccacaacgagcctggaagggctgcgtcctggtcgaaggtctgctcaccggtcgctcttttcttcggcaacattagagcgttttgtatgtcaggaatgattctctccagaagtcgggttgatacaaaaaggtcgcggcacatgactcgtacacgtcgttccagcccctctttatcttctgcggcagcacgaaatgccgctggaatagttgtttctgccttgtaaaggtcggcgatatcataaacgaaggataacatcttgcccgtatggatgaacccgagcgctggcgagaatccgcttgagacaatagcggcatggcagatgccgtaaagacatgaattggccgccgacaaggccctgttaaccggatctgcatcgttccacttgtcacgccggtagctgcgacctgaccatggcacgccggtttccttggcggcactggcataagcatcccggacacgcacgccttccataccgcggatctgttgcagggtcagctccggatcaaacgtttcggcaaaccgcatctcatacaaacagcgcacgaccttcagacgaaaatccacatcggcccaagcccgcgcttgatggagaaagttcgctgcgctccgtgtctcacccattccaaccgcgtaaaaccggattccctcttcgccgcaccaggtgaccaggcacccatggtcggcaagcacagagattgcggcatgcgtaattgagacgcccgggcccagcatgagcagcgccagattggcgcaggggacaggcaccttgccggatttgtcgtggatggcgatggcgcggtcttcctggtcgacgcggcaatgctcgacgtagaggtagctccacccgtcgctgaacttgggcaaaacgtgcaagtcctgaactctcatactgtgtgtcctaagccttcactattacccggtgcaaccgaaaggagcccgaaaccgaaggctttacctgaaccgataccgctgacaaatgtctgccgaaaggcatctgggtcaatgacctgaaggaggccgttgtaaagaaccgagaatagacgctggcccttgccatttttgctaatatagacataccctggcgtaaaagttgtaacgtcccgccttactaggaatcctgccgagcccgcctgacggacaagccagtcaataagtttgtcggccggaacaggaacgcgcttcccgatagagttgtcttttgcatcgggtgaatgcttgctcaaacgtctggtcggatttgccgacagacggaagcgaaggaactgacccttcgaaaaattcggctcgaatggttccacctctgggggggctgccagaagatggctcgcattgtgaaaagcatagccccagtcgggcgttagagcagactgcactatgatcaacgcccggccgttgggaagagggtcaatgcggaaaagaaatcctacatccatggcgcgcttcacgtggacttgaccgttaccaaacgcagccgaattgaatggtttgaggaagtccggatcttcggcctttcgtgatgtggatggaaaggccatacaaagccgctggtggacgtgatagcggttcctcaaccacaatcgaccgggccgcggacggtcggggtttgtgcctgtatcaatgagcagtctcgaacagtacatcattccacctcctcggcagaaagataacggcgtctggctgcaagcgaccggaatttgattatatcggcccgcttttggattatcagatcccgccagcgaatgtcctctgggttgatgcggtccagccccatattcattccatattcgagcatggtgacggcatcatggcatagaccgcaaagagaccgaagatcctcaagggtttcgtttccccctgcccttcggtatgtcacatgttggacggtcatgcgaggaccgggcgacttacagaagacgcacaccccggagtccttccttaatcgctcttcgcggcgctggcgatattcagagttcctatagtctgcgcgtggccgcggcggtgcatggggaaattcctgcaacgctttgccgactactggcgagacactgctccgtaggacaaaccggggcatgtggaccggcgggtcgaagcaaaccgccacgtcgtaccatacttccgcctcttcagaggcgatgtctccttccgaggctggccgccattccaaaatagtttggaccgtccctttctgcggcgttttatcatcggcgcaacgcggatgccacgggacggagttcagcgcggaggtcaggtcgccgtagtcgtcaggatttttccacccttcgccctcaccgggtctttcgagtatcggcaccgacggcggacaggacctgcggccaagaaagacaggccgcttcggagattcaatcgcctctgtgacatcagagatcaggtccggatcaccttgaagcgccactaaaaaactggcgtcggtcaggtattctcgacgcgtgatgagcgtgccctgagcaccggttttaacattgcccccggcggttgccaggccgacttctgctcctaccgtgtggtagtcccaccaacgtatgccgggccgatctattcgcacacccatcgcaagtgtattgagctccggcaggcgttcccgggccgcctgacgcgacaggcccatggcgcagcagataaggcccagcacgccggatttggtcggcgcctccatggtccgccggaggacgaacttggaggtgtcgccccaggcctgaaggagtccttcaagacgaaggaagagtgttttggcttctttcattccgcgtcctccgccgacttttcggctgatacgaccttctccatgaccctctggacaaacatgccgaactggccgaactcattggtaccgacgacggattgttcttgctcgtgttcctttctgcttttgtcaatccaagtcagggggtgaagcaggttaggagagaaccagaaacggtcagcctcgatgccgtaacccgtaatgatgtcgtggacatactgaccaagtctggcaatgctttcaccgatcaaagcgcgttcggctctttccggtaccggatcggcaaaggcgttggcatagctgaccggagtggctgacttggttttgacctcgaccagaactccgtcgggtaaattgaatgccgcaaatgcgtgctgtttgcctgagggattggctttggcggctgcttcaaggaaacattgcaccgtcttgcgtgcaagttctccatcatttctcaaattcttcttcaactgtttaaaatcaattataaaatgtttgtagaagcaggcggagttgaacatagtctcgttgacatgagccgcacctgcatcaggtccgggaaggtcgtcggcagcggtgaaatagtctacctcgtttatgaccgcgtgagttgaaatggcgtgggcagcggagagcgcagcctcgaccgt

SEQ ID NO: 885 - DNA, 3913 bp, Artificial Sequence
  Synthetic Oligonucleotide
  misc_feature (442)..(442): n is a, c, g, or t
  misc_feature (470)..(470): n is a, c, g, or t
  misc_feature (868)..(868): n is a, c, g, or t
  misc_feature (975)..(975): n is a, c, g, or t
  misc_feature (2182)..(2182): n is a, c, g, or t
  misc_feature (2215)..(2215): n is a, c, g, or t
cggttcacccccacatgcatggggaatacacttgatcaatagaggtctaagaggtcattgaacaccttcaagccttagtttaaggatgcttggtcataagtttgataccctcccattccgtaacgactcttgatgcggcaccccagaattcgatatcaaacccttgctcggtctgactactccagatcatcaggcaagttccaccgttgcaattgcttctaaccttatcccacagtttatctctaaccattgctgagactttacccacaaacaccccggcttttacttccagcagccaacgtgtgatcttacccctcagggagcttggcacattttccaatactaaaaccaccatcaatcttcctttggcagatcatcctgcccgtaagatatgccgcctggggaaacttctccatctggagaccagagtcctccaggcaangctggttcttcggcaaaacagtcatccnggctatcctctggcataatatcaccgaagagagaactaatatccgcgacaatgcgtttgagtagattctgcctgtggaattcatcacggcaggcaagcctgactctgcggtcgagttcgccgatcccttcagcggtcgcccggaatgcggcgggagcagccatttccattttgtatagatccgcgatatcatagacaaatgacagttgcttgccagtgtggacaaagcccaatccgggagagaatcctgcagcaacaatggcagcgtgcgatatgccgtagaggcaggagtttgccacagataatgcccggtttatgggatccgctttattccagttgtctctttgatagtttctgccctgcatgggcacaccatacttttgggagagttggaaatangtatcgcgcacccgggcaccttccttgcccctgatctggttcaaagttaaatcaggagaaagctcatcctggaacctcaactgatacatggagcgcacaacccgtanatgcaaaaccgggtctgcccagtactttgcctgtttcataagattgacggcgctacgggttgtacctgtgcctgcggcatagaacctgacgccatgttcccccacccaggctaccagacagccacaggcagccagtgaaagtattgccgcatgggtgatggttatgcccggtcccagcatcagcatagccaagccggcacaaggaaccggggtttctcccagggcatcgtgaatggcgatggcttgcccgttctgatcaattttggcatgctccacatagagatagctaagccgatctctgatccgggggatagagtgcaggtctttattcatcattcctgattggcagaacggacagcaggccaaagccgaagcttttcgcttttccaatgccgcttctaagcgtttccaggaacagtttcgggtcatccactttgagaattccctccagtagagccgaacggaagcgcagaggattgtatgtgtgttcacgccagtagccctgtccctgttcctttgctttgacatttttaggttcaggcttggagccataaacccaacccagttgaagaagctcacagcgcttaagggtgaagcccagctttgggcttttggcagccagccagtcggcaagggcctgatccggggtggaagagggatcccaggtgagagaaacccttttgtgcaggatgttgccagtttctatggtttgaccgtcctgttgcaccttctcaggaatataacggcgtacgctggcgtttacccgcagcctgaaccggagcagttgtcccgcttgaaactctggattatactcctttgtttccggcggcgcggccaggaaatcaaacgcgttttggaagcaataatcccaatccggctcaagaacggactggacgataataatcgcccttttatcatttccgtcgatgttgttatcgacccggaaaaggaagggagttttttggaagtcgtttggcgaaaagggcttcaggaaatgcggatcctgctcccggcgcaaacctgaagggaacgccatggaaagtcggcggtggacgttatagatattgtccagccactttctgccggggcggggacggtctggattgcctccagtatcgatcaatagcttggacaagtagatcatccgttttcctcctctggcttcattttgcggaaacgctgcccgcgcgaacggaactcgactatntctttgcgctttgccagtattcgctcccgccanatggggtcgcaggggtcgatgcggtcggtggtcatgccggaaccgtattccagcatggtgcaggcgtcgtggcagaggcggcacagcgcccgcaggtcttccggtatttccttgcctcccgccctgcggtaattcacgtgttgaacagtcgtggcgggagctttgcataccatgcacgcggcatggtccatcacaagccgctccgccctgaccttcttatactcggaattgttataatccgcccgggttcctttgggcctccaaacgctggttccggtttccctgctcacttgcacatcctctcccacaaccagttcacgcctgatcacgaagcgcggcaaatggcggggcggctgaaaagaaaccggcagatcgtaatgaatctccgcgtcatcaggcgcatgttctccgtcatggctggggatccagtccatgacgcaaggcagtatttgcggcaggggttcattgtgccagcgcttttgcaggggaaccgcggacagcgcctcctccaaagtgttgtaaaagcccggagcatgctcgcccacgggatgtgaagggggacaggatttgcgccccagataaattgtccagaccggcttggccagagcggcggagagctttgccacaagttccggctcaccctgcaaggcgaccagaaaactggcgtcggcaagatattcgcggcgtgagagcaaggtctctgccctggtttttactttgcttggtgtcagggtttcagccagggcagctccaaccatggaaggttttttgggtgccttcagctctgccatgcgcattctttgtcccgctccaacagtatggaagtcccaccagcgtatgccggggcggtctatccgcacgcccatgcgcaggttggcgagttttgggagccatgaatcagcagcctccgcgcgcccaattcccatggccgcacaaagcagccccaggacacctgattttgtgggagcgtcggtagtcctgcgcaaagcaaacttagcctcgttgctgccccaggactgcaaagccccctccaagcgcaagaataaggtgttgggtggcgcactcatgttagccgccaatataagccttgcttttctgaacttcttcccacttgaagccgccaatataatccaacacagcgcctacaagctcattgaggttgccaatgtttctggaagccagtttggaatgcttatagccaagggaatagcgattgtttggagaaaaccagaagctgataactggggattgctcatcataatagccaagcctgatgtcgttcacgtagttggaaagctggccgatgctttgttccaccaggtccgattccttgaccacggaaactggcctgacgaatgcgttggcgtagctaataggggaattcttgaactcaacaaggatgccatcgggatagttatgagcggcgaagctgttctgtttgccactggggttggttttggcagcagcgaggagaaaggcacccacggtgtgggctgccagattcgtgtcccctttcaggttcttgaccaactgttcccaatcaatggagaagtatttgtagaaacaggctgaggcaaacatggattcgccaatatgacccgccccggcgtcttcaccgggaacatcatcggccgccacaaaatagtctatctcaggtctggcaatgtgggtggagatcgcatgtgcaacctgtagggc

SEQ ID NO: 886 - DNA, 3835 bp, Artificial Sequence
  Synthetic Oligonucleotide
atccccgcgtgcgtggggacaattcagcggcggcgcgtcgttcgatccgaaagagcggttcatccccgcgtgcgtggggacaatgtccccgttacgcagcgcagtcatcgcggcgtcggttcatccccgcgtgcgtggggacaattactcatcccacagacgccactcgacctcgtccggttcatccccgcgtgcgtggggacaatgtgtcgctctccgacagcgatacgccgcaagccggttcatccccgcgtgcgtggggacaataacgccaccaacattatcagcacgggctcggccggttcatccccgcgtgcgtggggacaatggcccgacgcgaccgccgttttgctccaggcgaggttcatccccgcgtgcgtggggacaatcctccttcgtcccctggacctgcgactccggttgcggttcatccccgcgtgcgtggggacaatactgaaaaacaagcatactatgagcagcgaacgaggagcaacccctcccaatcgacaatctgtcgggtcgtttctccccaggaacgaatttgaaatccctgttcggaattgcaggagtggaccatgacacagccaccaccctttgcccccgaacaagccttttgccagagttgttcgcgcaccaaggccgaaacccgcccgacgaacacgcccgccttaggttcgaggagccagcgagtgagttctccgcgcaagctggtcgggacattttcaaggattagaaccaccatttggctgttctccttccatcggatacattcgaccgccttgcacatcaccgcgcggatcccaaagtgagccgggcaaagctggatccacatccggcgacccggcctcgtccacgttgccgccgggccgggcaaccatcaacacggtttggatatctggaatgattctctccaacaaccggctggatacgaacgcatcgcggcaggccaaacgaactcgcctttcgaggccttcgtggccggcggcaacggctcgaaacgcgatcggcacggtcacttcggtcttgtacaggtctgccacgtcataaacgaacgacagcattttgccggtgtggatgaatcccaatgctggggagaatccggccgacactacggcggcgtgacatacgccatacaggcaggagtttgcggccgacagcgcacgattcaccgggtccgcccgatcccattgatcgcgctgatagctgcgtcccgaccagggaacaccggtggcggcggacgcggaggcataggcatgccgcacccgaatcccctccataccgcgaatctgctgcaacgataagtcggcgtcgagccgttgggcgaatcgctgttgatagagattgcggaccacctgcaaatgcagcttctcgtcggcccacatccgggcctgatggagcaggttggcggcgctgcgggtctcgcccgttcccaacgcgtagaatcggacgcccgcttcgccgcaccacgcgaccaggcagccgtgatcggccagcacggacaccgcggcgtgggtgatcgacaccccgggtccgagcatcaagagagccagattggcgcatgggaccgggaccttgccgacggcatcgtgaatggcgatcgcctgggaatcctggtcaatccggcaatgctcgacatagagatagctccagccatcacgaaacttcggcagcacgtggagatcgtggattcgcatgctcgtcgctctgcgagtgttgcgctcccgccgccggaatgaccgaaagcaacccgaagccgaaccccttcgcaggaccaatccccgaaacgatcgtctgccggaacttttcaggatcgttgacggttaatatcccgtcgtaccgggctgagcggagccgcgctttctggtcatcgcggcgtttgtccatataaacgtagcccggctgaacatggatgttgtccggatcgaaggtgaatccgtgatccgtggcacggcgagacagccactccagcaactggtcggcagtgaccgggacgcgttttccgatccatttttccttcacgagttctccgtttcgttcccgcgaatccttacgcaatcgcttcgtcggattcgctaggaggcggaatcggagatgctgatctttcttaaagtccggatcgtatcgcttgtattgtggacgtgctgccaggagaaacccggcgttgtgaaaggcgtagtcccagtcgggctcgacggcggattggaccagaatcaccacgcgaccgcaggaatgcggctccactcggaacagaaatcccttgccggtttttttgcgatcgacgtgaacctgatcgagttgacggtcgctgggattgtacggttgcaagaaatgttcatccatacgcttgcgctcgtcagacatgaaggccatggacagacgctgatggacgcgataaaggttgcggagccagcggcgggcaatgttccagttcggtcggtcggggttgtggccaacgtcgatgagcaaatgcgacagatacatggttaaacgtcctcctccagaatttccttacggactttctccggcgcggtgcgtaaagcgcggcgacgcttctcctcgctgcggaattccagaatctggttacgagttcgcaagatttcgtcctgccagcgcggttcttcggggttgatgcggtccaggcccatgccgagcccatattcgatcatcgtcaccgcgtcgtgacagaggcggcaaagcgagcgcagatcgtcttgcgtttcatcgccaccggcgcggcggtaggtgacatgttggaccgtcgttgccggagctttgcagaacacgcataggcggtggtcagattcgagccgctgtaagcgccgcttcttgtattcggtgttgctgtaatctgcccgcggacgaagcgggcgcggtgtggcgctttgcgcggggttgggtgcaatggaaagttcgccattctcactaacgcgcaatgagcggcgaatcacaaagcgcgggttgtgacccggcggctcgaacgtccgcggcacgtcgtaccatatttcggtgccgtcgggcgcctcgggttggtcaactgtaggctgccaatcaagcagtgcatcgacggtttgcggtgccggatcacttttaagtcggcgacgccaggggacggatgcgaatgccgaaagcaggtcatcaaacttgccggcgggatgctcgaggagagggcgcgacggtggacatgattttcttccgagatacaccagccattttggtttacggatggcaatagcaatctcttcaatgaacgaggaatccccttgcagtgcgactaggaacgaggcgtcgcaaagccattcgcgccgcgtgatcatcgcgccgggcttggtctttccttgtgcttcagcaatcctcatctgcatccctgcgccgacagtgtgataatcccaccaacgaacgcccggcgcgtcgatccgaacccccatgcgtaaggtggggagcttcggaaaccacttggccggcgctatggagcgggagatctctaatgccgcgcagatcattccgatcactcccgatttcgtcggcgcctcggcggtgcgacggacgaggaacttcgattgatggtcgccccacgcctgcatgggtccttccaagcggagaaacagtgtgttggcgctcatgatgccgcccctgagttaagaaccaccttctgcacttcagcccaatcgagcttttcgtcgatagctttgatcactgccgggatcaactcgtcgagtgatttgaagtctttgttggtaaggttgatctccttttggtttttcttgccgttcttctcctccgtgacctgagctgtcaatgtgtgacgcagattaggcgagaaccagaaccgcttatg

SEQ ID NO: 887 - DNA, 3825 bp, Artificial Sequence
  Synthetic Oligonucleotide
tagcaaggtgtttaagcccccggcttacgcggttcacccccacgtgcgtggggacaatactaaaaaaagcctgtaattacggcacacggacaagaaaaagcccttcgaagtcttcgaccgaccgcgccatctctccccaactacgaaaccgaaaaccctgctcattgtcgctcgaatgaatcatcaaacatcctcctcccttggattggtcgcaggctttctcccaaagtctttcgcgtaccatggctgaaaccctacccacaaagacacccgctttcggttccagaaaccaccttgtcaattcaccccgtaacccaggcggcacacgctcaagaatcagaaccaccatcgttagactccatttcatctgtttccaacggataggcgtacccgccctgcacttctcctgtcgcagggtcccacaacgagcctggaagggctgcgtcctggtcgaaggtctgctcaccggtcgctcttttcttcggcaacattagagcgttttgtatgtcaggaatgattctctccagaagtcgggttgatacaaaaaggtcgcggcacatgactcgtacacgtcgttccagcccctctttatcttctgcggcagcacgaaatgccgctggaatagttgtttctgccttgtaaaggtcggcgatatcataaacgaaggataacatcttgcccgtatggatgaacccgagcgctggcgagaatccgcttgagacaatagcggcatggcagatgccgtaaagacatgaattggccgccgacaaggccctgttaaccggatctgcatcgttccacttgtcacgccggtagctgcgacctgaccatggcacgccggtttccttggcggcactggcataagcatcccggacacgcacgccttccataccgcggatctgttgcagggtcagctccggatcaaacgtttcggcaaaccgcatctcatacaaacagcgcacgaccttcagacgaaaatccacatcggcccaagcccgcgcttgatggagaaagttcgctgcgctccgtgtctcacccattccaaccgcgtaaaaccggattccctcttcgccgcaccaggtgaccaggcacccatggtcggcaagcacagagattgcggcatgcgtaattgagacgcccgggcccagcatgagcagcgccagattggcgcaggggacaggcaccttgccggatttgtcgtggatggcgatggcgcggtcttcctggtcgacgcggcaatgctcgacgtagaggtagctccacccgtcgctgaacttgggcaaaacgtgcaagtcctgaactctcatactgtgtgtcctaagccttcactattacccggtgcaaccgaaaggagcccgaaaccgaaggctttacctgaaccgataccgctgacaaatgtctgccgaaaggcatctgggtcaatgacctgaaggaggccgttgtaaagaaccgagaatagacgctggcccttgccatttttgctaatatagacataccctggcgtaaaagttgtaacgtcccgccttactaggaatcctgccgagcccgcctgacggacaagccagtcaataagtttgtcggccggaacaggaacgcgcttcccgatagagttgtcttttgcatcgggtgaatgcttgctcaaacgtctggtcggatttgccgacagacggaagcgaaggaactgacccttcgaaaaattcggctcgaatggttccacctctgggggggctgccagaagatggctcgcattgtgaaaagcatagccccagtcgggcgttagagcagactgcactatgatcaacgcccggccgttgggaagagggtcaatgcggaaaagaaatcctacatccatggcgcgcttcacgtggacttgaccgttaccaaacgcagccgaattgaatggtttgaggaagtccggatcttcggcctttcgtgatgtggatggaaaggccatacaaagccgctggtggacgtgatagcggttcctcaaccacaatcgaccgggccgcggacggtcggggtttgtgcctgtatcaatgagcagtctcgaacagtacatcattccacctcctcggcagaaagataacggcgtctggctgcaagcgaccggaatttgattatatcggcccgcttttggattatcagatcccgccagcgaatgtcctctgggttgatgcggtccagccccatattcattccatattcgagcatggtgacggcatcatggcatagaccgcaaagagaccgaagatcctcaagggtttcgtttccccctgcccttcggtatgtcacatgttggacggtcatgcgaggaccgggcgacttacagaagacgcacaccccggagtccttccttaatcgctcttcgcggcgctggcgatattcagagttcctatagtctgcgcgtggccgcggcggtgcatggggaaattcctgcaacgctttgccgactactggcgagacactgctccgtaggacaaaccggggcatgtggaccggcgggtcgaagcaaaccgccacgtcgtaccatacttccgcctcttcagaggcgatgtctccttccgaggctggccgccattccaaaatagtttggaccgtccctttctgcggcgttttatcatcggcgcaacgcggatgccacgggacggagttcagcgcggaggtcaggtcgccgtagtcgtcaggatttttccacccttcgccctcaccgggtctttcgagtatcggcaccgacggcggacaggacctgcggccaagaaagacaggccgcttcggagattcaatcgcctctgtgacatcagagatcaggtccggatcaccttgaagcgccactaaaaaactggcgtcggtcaggtattctcgacgcgtgatgagcgtgccctgagcaccggttttaacattgcccccggcggttgccaggccgacttctgctcctaccgtgtggtagtcccaccaacgtatgccgggccgatctattcgcacacccatcgcaagtgtattgagctccggcaggcgttcccgggccgcctgacgcgacaggcccatggcgcagcagataaggcccagcacgccggatttggtcggcgcctccatggtccgccggaggacgaacttggaggtgtcgccccaggcctgaaggagtccttcaagacgaaggaagagtgttttggcttctttcattccgcgtcctccgccgacttttcggctgatacgaccttctccatgaccctctggacaaacatgccgaactggccgaactcattggtaccgacgacggattgttcttgctcgtgttcctttctgcttttgtcaatccaagtcagggggtgaagcaggttaggagagaaccagaaacggtcagcctcgatgccgtaacccgtaatgatgtcgtggacatactgaccaagtctggcaatgctttcaccgatcaaagcgcgttcggctctttccggtaccggatcggcaaaggcgttggcatagctgaccggagtggctgacttggttttgacctcgaccagaactccgtcgggtaaattgaatgccgcaaatgcgtgctgtttgcctgagggattggctttggcggctgcttcaaggaaacattgcaccgtcttgcgtgcaagttctccatcatttctcaaattcttcttcaactgtttaaaatcaattataaaatgtttgtagaagcaggcggagttgaacatagtctcgttgacatgagccgcacctgcatcaggtccgggaaggtcgtcggcagcggtgaaatagtctacctcgtttatgaccgcgtgagttgaaatggcgtgggcagcggagagcgcagcctcg

SEQ ID NO: 888 - DNA, 3817 bp, Artificial Sequence
  Synthetic Oligonucleotide
cggttcacccccacatgcatggggaatacacttgatcaatagaggtctaagaggtcattgaactccttcaagccttagtttaaggatgcttggtcataagtttgataccctcccattccgtaacgactcttgatgcggcaccccagaattcgatatcaaacccttgctcggtctgactactccagatcatcaggcaagttccaccgctgcaattgcttctaaccttatcccacagtttatctctaaccattgctgagactttacccacaaacaccccggcttttacttccagcagccaacgtgtgatcttacccctcagggagcttggcacattttccaatactaaaaccaccatcaatcttcctttggcagatcatcctgcccgtaagatatgccgcctggggaaacttctccatctggagaccagagtcctccaggcaaggctggttcttcggcaaaacagtcatccgggctatcctctggcataatatcaccgaagagagaactaatatccgcgacaatgcgtttgagtagattctgcctgtggaattcatcacggcaggcaagcctgactctgcggtcgagttcgccgatcccttcagcggtcgcccggaatgcggcgggagcagccatttccattttgtatagatccgcgatatcatagacaaatgacagttgcttgccagtgtggacaaagcccaatccgggagagaatcctgcagcaacaatggcagcgtgcgatatgccgtagaggcaggagtttgccacagataatgcccggtttatgggatccgctttattccagttgtctctttgatagtttctgccctgcatgggcacaccatacttttgggagagttggaaatatgtatcgcgcacccgggcaccttccttgcccctgatctggttcaaagttaaatcaggagaaagctcatcctggaacctcaactgatacatggagcgcacaacccgtaaatgcaaaaccgggtctgcccagtactttgcctgtttcataagattgacggcgctacgggttgtacctgtgcctgcggcatagaacctgacgccatgttcccccacccaggctaccagacagccacaggcagccagtgaaagtattgccgcatgggtgatggttatgcccggtcccagcatcagcatagccaagccggcacaaggaaccggggtttctcccagggcatcgtgaatggcgatggcttgcccgttctgatcaattttggcatgctccacatagagatagctaagccgatctctgatccgggggatagagtgcaggtctttattcatcattcctgattggcagaacggacagcaggccaaagccgaagcttttcgcttttccaatgccgcttctaagcgtttccaggaacagtttcgggtcatccactttgagaattccctccagtagagccgaacggaagcgcagaggattgtatgtgtgttcacgccagtagccctgtccctgttcctttgctttgacatttttaggttcaggcttggagccataaacccaacccagttgaagaagctcacagcgctgaagggtgaagcccagctttgggcttttggcagccagccagtcggcaagggcctgatccggggtggaagagggatcccaggtgagagaaacccttttgtgcaggatgttgccagtttctatggtttgaccgtcctgttgcaccttctcaggaatatgacggcgtacgctggcgtttacccgcagcctgaaccggagcagttgtcccgcttgaaactctggattatactcctttgtttccggtggcgctgccaggaaatcaagcgcgttttggaagcaataatcccaatccggctcaagaacggactggacgataataatcgcccttttatcgtttccgtcgatgttgttatcgacccggaaaaggaagggagttttttggaagtcgtttggcgaaaagggcttcaggaaatgcggatcctgctcccggcgcaaacctgaagggaacgccatggaaaggcggcggtggacgttatagatattgtccagccactttctgccggggcggggacggtctggattgcctccagtatcgatcaatagcttggacaagtagatcatccgttttcctcctctggcttcattttgcggaaacgctgcccgcgcgaacggaactcgactatatctttgcgctttgccagtattcgctcccgccatatggggtcgcaggggtcgatgcggtcggtggtcatgccggaaccgtattccagcatggtgcaggcgtcgtggcagaggcggcacagcgcccgcaggtcttccggtatttccttgcctcccgccctgcggtaattcacgtgttgaacagtcgtggcgggagctttgcataccatgcacgcggcatggtccatcacaagccgctccgccctgaccttcttatactcggaattgttataatccgcccgggttcctttgggcctccaaacgctggttccggtttccctgctcacttgcacatcctctcccacaaccagctcacgcctgatcacgaagcgcggcaaatggcggggcggctgaaaagaaaccggcagatcgtaatgaatctccgcgtcatcaggcgcatgttctccgtcctggctggggatccagtccatgacgcaaggcagtatttgcggcaggggttcattgtgccagcgcttttgcaggggaaccgcggacagcgcctcctccaaagtgttataaaagcccggagcatgctcgcccacgggacgtgaagggggacaggatttgcgccccagataaattgcccagaccggcttggccagagcggcggagagcttttccacaagttccggctcaccctgcaaggcgaccagaaaactggcgtcggcaagatattcgcggcgtgagagcaaggtctctgccctggtttttactttgcttggtgtcagggtatcagccagggcagctccaaccatggaaggttttttgggtgccttcagctctgccatgcgcattctttgtcccgctccaacagtatggaagtcccaccagcgtatgccggggcggtctatccgcacgcccatgcgcaggttggcgagttttgggagccatgaatcagcagcctccgcgcgcccaattcccatggccgcgcaaagcagccccaggacacctgattttgtgggagcgtcggtagtcctgcgcaaagcaaacttagcctcgttgctgccccaggactgcaaagccccctccaagcgcaagaataaggtgttgggtggcgcactcatgttagccgccaatataagccttgcttttctgaacttcttcccacttgaagccgccaatataatccaacacagcgcctacaagctcattgaggttgccaatgttcctggaagccagtttggaatgcttatagccaaggggatagcgattgtttggagaaaaccagaagccgataactggggattgctcatcataatagccaagcctgatgtcgttcacgtagttggaaagctggccgatgctttgttccaccaggtccgattccttgaccacggaaactggcctgacgaatgcgttggcgtagctaataggggaattcttgaactcaacaaggatgccatcgggatagttatgagcggcgaagctgttctgtttgccactggggttggttttggcagcagcgaggagaaaggcacccacggtgtgggctgccagattcgtgtcccctttcaggttcttgaccaactgttcccaatcaatggagaagtatttgtagaaacaggctgaggcaaacatggattcgccaatatgacccgc

SEQ ID NO: 889 - DNA, 3808 bp, Artificial Sequence
  Synthetic Oligonucleotide
agcctggcgacgacacaggtgctggattcatagacgaggcgatgtttgcttcggcctgtttctacaaatattactcaattgattggaataccttgataatcaacctccagggtaatgaaaagttggcagctcatactgtcggagcctttatccaggccgctgcactcactaatcccagcggaaagcagaacagctttgccgcacataaccttcccgatggaatattggtagaaataaaagagacacctgtcagctatgcaaatgcctttgtgcgaccggtgggaatcgttaaggattctgacttggtagaacaaagcattggccaactggccaactatgtgaaggatataagtgccggtttcttccctggacagatgaaaggcaacgctctgtggttctcgcccaatggacgttatcccctaaagcctcaacagggcacgctggacataaagccagtttgcaacctgctagaacttgttcgcgaagcagttgagatgttgggttttgaatgggatgatgtaaaaaacgagaaagtagagagttgaaatgtcttctccgcctaataccctgttcctgagattggaggctccccttcaggcctggggaagcaatgaggccaaattcgccgtgcgcaggacagccgacgcgcccaccaaatccggagtggcaggcctgctctgcgctgccctgggaatcagccgggccgaagccggacagtattggctgggtgaaattgccaaattgcgcatgggggtgcggatagaccgcccgggcatccgctggtgggattaccatactgtgggagcggagcagaagctgcgcatttctgacctgaaaatgcccaacggcctagttctggttggcactgccctggccaaaaacctgggcgcggacaagatcaaatccaaacccggggctttgctctcccgacgcgagtatttggctgatgccagcttcctggttgcgctccagggtgaaccggatatcgtggcacaactggctgaagcgctgaaaaaaccagtctggacgctttatctggggcgaaaatcctgtcccccctcccgtccggtggatgaacacccgccagggttttatgccagtctgaaagaggctttgcggtcgatcccggcgcaactgagggaaaaaggcgaaccgatacctgacagtgttccctgtgtgctcgactgggttccggcccatgatgacgtgcacgctccgccgaacgccgaagcgcattacgacgtgccggtgtcctttgagcctccccaccacttgccccggctggtgatccgctgtaacctgccattggaccgcaacttcgaggcagagaccgtgctttccggcaaagcctggcaaccgccccgcaaccgggcaaattacgacaatcctgaatacaaaagggtccgcgctgagcgtttggtgatggacaatgccgcctgcatgttctgcaaggcacccgccactactgtgcagcacgtgaattaccgacgcgccggaggcagcgagaagccggaggacttgcgcgccctctgccgcctctgccacgatgcctgcaccatgctggaatatggcagcggcatgaccatggaccgcatagatccctgtgaccccgcctggcgtgagcgcatcttggccaaacgcgaggaaataatcaaattccgctcgctggagcagcgcaggcgcaaactcgatccgaaggaggagaacggatgatgtatctatcccaactgctcatcgacacaggcggcaaccctgaccggccaaggcccgggcgcttgtggctgaacaatatctataatgtccaccggcggctcagcatggctttccccatgcgcaagcgcaaggaaggagacccgaggtttctgcagccctttgaccccgcagattttgaaaagcgccagttcctctttcgggtggacaacaacaccgatggagaaaatcaaagggcgatggttttggtgcagtcgtccctgccgccggattgggactgggctttccagaatgccacgggatttttggcagcccctccccaggttaaggaatacgatccccagttctcagcaggtcagcggctgcgcttccgcatcctcgtgaatgccagtgtcaaacgcaaaatcgacgagttgcgggaaggacccggaggaaaggaaaaaacgggaagggttctgcacaaacgggtcgcccttacctgggacacaaattccaacccaaaggatgcggtggcgcaatggtttgccgccaaggctggcagactgggcttcacgcccggggagaccgaactggtaagcctgggctgggtatacggttccaaaccggagccccggggaaattcgccccggcgtgagaacgaataccgtcccctgagataccgttcccccctgctggaaggttatctgacagtggatgatgcctttctgttccgggaagccttggaaaaaggtatcggcagcgccaaaggaatgggcttcggcctcctttccgtggttccggcaagtgatgcgtaacagagaccttcacctaatgccaaaaatgcgggaccgcttcacctatctctatgtggagcatgccaaaatagacaaagaacaacaggcaatcgcctttcacgatgccatgggctccactcctgttccctgcgctggactggccctgctgatgctggggccaggcgtatccatcacccatgcggccatccttgttttagcagaatgcggctgtttggtggcttgggtgggggaacagggagtccgcttttactcatccgggacagggaccacccgtagttccgccaaccttatgcgtcaggctgccgcctggtcaaatcgagatacgcatctgcggatagttcgcagaatgtatgaattgaggttcaaggaaaaactggacccaaccctctctcttgaacagataaggggaaaagagggagcgagagtacgggatacctatttcagactttcaaaagaattcgatgtgcccatgagtgcgaggaattacgacaggagcaactggaataaaaccgaccccatcaacagagccctgtccgttgccaattcctgtctctatggcatctgccacgccgcgatagtggccgctggctattcacctgccctgggtttcgttcatactggcaaacaactgtcatttgtttatgacattgccgatctttataaaatggaaacctccgtgcccgcggctttcatagccacagccgcaggggtcgataacctggacagaaggacacgcattgcctgccgtgaccagttctatcaatttggtctgctaaagaagatagtggccgacattcacgcccttttcggtattctggaaacttcggacgatgagccagaccttgctgatgtcgatccagccgtgccaggcgggctttggaacccagatgataaagtgagccccggcggcttgtcatggggtctggatgatcctggaggccatgatgatggttctggtgcttgaaaaagttccctctggcctgagaggagaaattacacgctggctcctcgaaatcaaggctggagtatttgtcggtcaggtatcggccatgataagggaaaagctgtgggacaaggccaggtctggttgtgccggtggaacttgtatcatgatttacagcaagcattgcgaacaaggctttggaattgagttttggggtgccgcggaaaggatagtgacagaatgggaaggattgaaattgatgaccaagcatccgtgatccatacttgaagcctgttcaatggcctcaaagcgtctactttcgaagtgtgttccccacctgcgtgggggtgaaccgatcgca

SEQ ID NO: 890 - DNA, 3765 bp, Artificial Sequence
  Synthetic Oligonucleotide
gaagcgaagctgttggcccttcgcgaagcgggggtcgaattcctctacctgagggggagcggccagaggattcagaagaaaacgggcgttgtggaaggcgtagccccagtcaggctttacggcagagttagactggacgaggatcacgacccgcccgcccggttgcgggtcgatgcggaagagaaagccggagtcgccgtcacgtcttacatggacctggttgttggcaaagtccgcgggtttgaaaggcttgaggaagtggggatcgtgggatattcggtctttggatggaaacgccatgcaaaggcgctggtggacgtgatggaggtttcgcagccagagccgcccgggcctggggcggtcggggttggtgccgacgtcaatcaagaggcaggagaggtacatggctattccacctcctcagcggcaaggcgtctgcggcgagtctccagagagcggaacctgataatctcttcccgcttctcgatgatcttgtcgcgccaacggggctcttcggggttgatgcggtccaagcccattccgagcccgtactcgatcatggtcacggcgtcgtggcagaggcggcagagggagcgcaaatcgtcccggagttcgccgccgcccgcgcggcggtacgtgatgtgctgcacggtgctggcgggagacttgcaaaaaacgcacaagtgatagtcgtcgtcgagccgctccttgcgtcggtttttgtactctgtgttcgtgtaatccgctcttgggcgcggaggcggtggcgtgtcgctctgcggtggctgcaccgcaagtgttacgtcgccgtccgctccgacgcgcaactgcctgcggatgacgaatcggggttggtgcgacggcggctcgaatgtcaacggcacgtcgtaccagacgagcgcatcatcgggcgcctcgggctgctcgttggtgggttcccaatcaagcaggcaatcgacgggtcgcggctggggatcgtccttcagccgccgacgccaggggaccgattcgagggcagaaagcaagtcggggaattcacctcccggatgctccagcagagggcggcaaggggggcagcactttctgccgaggtagagtgtccacttgggcgctttgattgccgcctccagttcctcaatgaggtccggttcgccctgaagagcgacgagaaacgaggcgtcgcaaaggtattcgcggcgggtgagcatggctccggacttggttcccccctcggcggtacgcatcggcatccccgcacccaccgtgtgataatcccaccagcggacccctggcgcatcgacgcgtacgcccatgcgcagccgggccagccttggaagccagccttcgcgggcctctggccgggaaacgcccaatgccgcgcaaagcatcccgatgacgccggacttggtcggcgcctcggccgtgcgccgaatgacgaacttggattgctgatcgccccatgcctgaagaggaccttcaagccgaagtagcagcgtctttgcgctcatggggcacctccggattcaggaccactttcttggcctcctgccagtcgtaaccgatttccttgagtacagccgctatcagttcgtcaagagacttaacatctttgtcggcaagcgggacctcacgctgtttctgttttccgtcttcgctctccgtggtggtagccgtcaacggatagcggagatttggagagaaccagaaccgcttcgtcggcttgccgtatcccgtatctatgtcgttcacataatgggcaagctgcgccacgctctgcgagatgatgtcccgttcgccctgaggagccgccggtttggcgaaggcgttggcgtagctgatgggagtgtttctgacttccaccaacatcccgtcaggagggttgtgcgcggcaaaactattttgttttcccgtggggttggccaaggccgcggcgcgaatgaaggcgccgacggtatgggccgccagtttttcgtgattcgtcccgaagggcttcaggtttttgaccagcgtttcccaatgaatggagaaatacttgtagaaacatgccgaaccgaacatggcttcatccacgtaacctgcgcccgcgtcctcgccggggacatcatcggcggcgacatagtagtccacctcgggccgggcctcatgggtggaaatggcatgggcgacttgaagcgatgcctcaaccgtcgtgtctttgaggactcccgtttcaagcatcctgccgctcagcgccatgtccggcacggcgacggattcactgatgagcttgccgaactccgctgccaaggcctcgtccgtttttccgtcgccctgctggaggagttcggccatgcgtgtaatcgcctcttgggtggtgtaaaccagcatcttgctcctctcagcactttcctgttcgtcttctccttcctgtttttttgctttcttaggctccagcccgcaggctttgagaatgttctccgctcgcttcctgacgtctttgcccgtcaccttttccgcaatctctttcgccaactggcgggtgcgaactccgcccagcaattgtctgaactcctcactcatgcggatgctgcgcttaaggcactggctggaaatacgggagcgcaagactccgccaaaaaagcaagtcttgggcgcgcccaggtcatcccggttcaggttggccgggctgtgattctgaatggcgtgaatctggatcaacatgactctcctcctcttggacagttcaaaaattcctcggcccatttgagccgggtggattcgcgttcccagatggaaagatcgttcgtcagccgcacccagtcgagttcgaggtgcttggaagctatgaggtcgattgcccactgtagggcgggttcgatttcagcaagcggcagcgtgagcatcctgtcgaagcgttgctcgaaacgctgccgcgctgttttctcgcccggccgggatcgcccgagctggcgagcgagggtctcgcggggtgaatgctcgaggggccggagggcgtagagtttggcgacaagccaggccacctcacggcgaggcgcccgttgggtttgcgcccgcagcggccaccaaaggcctgcgaaaaggtcaaagccctctaccgattcgtcgagcccttgcccggcatggttgcgcaagagcccgagctcaccgggtttcagtcgagtcagaacttcgacgtactgctccgttggagtcacttgtcccccccttcgtctttgttgtttctctttggccgcatgtccggctttacagcggcaatttcttgtcgcctccggagggaagcggttgtgtagcccggggaaagcgatttggcgacggcggccatcaacggacgatattcctgggccgcctcttcccatgccttaccgccttctgcgatcatctcgtcgatttttccggaaaccgttgcctcggcttggggacgaacagcggcgactgcggagagaatttcaaggtgtcctctgtttcgtgaagtctctcgcggtttggctctgccaacgagcttccagccttccttctgccacgcctggatttcttgcaaactcgcctgaaccttcacgtcgtcgagcgcggccaagaattgaatctcccgctcggctgcttccaggtatttgtcgttctgcactgtcgcaaagctgacgacccacaacttactgttccccttcggcttttccccgcacaggattcccgccacgaccttcgtccacttcccagccgcagcgtcggccggccaagcgcgctgaaaggcttcacaatctcgtcgccttc

SEQ ID NO: 891 - DNA, 3755 bp, Artificial Sequence
  Synthetic Oligonucleotide
cgccaacagagaagtttgtccgaacgctggaatcgcttgagcctggcagccttgggcgattgcgcagcctgggtgggcgcagcctggatgagtcagtggagggtttcgaccttttcacggggatttggtggccactgagggaacagaaccagagagcccctcgccgtgaggtggcgtggctggttgccaaagtgtatgcgtaccgcccgatgcgacaatgcaaaggagcaaggcttgccatgcagctggggaatgtgaaaggcgagagcgagccagtgatgcagcgacgacaagccaagttcgacgaactcctcctgctccctctgaccctgatcgagccagcgctgtgttgggcgctggatctgattgcgaaagacagcggtgagttggactgggtgcgcctcaccgatgagttgtccgcatgggagcgtgaagaaacgcggctcaactgggcgacgcaatacctgcacttcgggcagtgacatgctcaaaaggagaatactatgctgatcgaaatccatgggattcagaaccacagcccggccaatctcaaccgtgatgatctgggtgctccaaagacatgcttcttcggcggggtgatgcgctcacgtatctccagccagtgcatcaagaggagcatccggaccagcgagcagttcaagctgctgtgtggtgggatccgcacgcgaagactgccgcaatacctggcgtcccagatcgcagaaaaagacatgctttcgctggccactgcggtggttcaggcgtgcgggcttgcgaaggacgacgcggcaaagaacgggaagaaggatgtcatcgttttcctgtcaaagagcgcgactgcgcacatggtggatatgcttcgtgcggaagaggcggaagtgacagagaagcgagtcgccaaactctcgcgagaattcgcccgcctcgttgcacaggatcgctatgcgccggacatggcattgtcaggacgcatgctggaaccagccaagccccccaagagcaaaaagggtcgcaacgcggacacggacgaacaggaggacgagaaggccgacagcagcgccaaggacaagggggtctggaagggccttgatctagacatcgaggctgcgttgcaggtggcccatgggatatcaacccacgaagctcgtccggaagtggactacttcgtagctgcagatgacataccaggtgaggatgcgggtggtgcgcacattggcgaagccatgttcgcgtcggcctgcttctataaatacttctcgatacactgggaaacattggtggacaacttgaacgggaacagggagctggccgcccacaccgtcggggccttcattcgtggagccgcgctggcgaacccgaccgggaagcagaacagcttcgctgcccacaaccctccggacggcatcctcgtagaggtaaagcaaactcgctccacgccaatcagctacgcgaacgcattcgctgcaccggtgccgagcaagggaacgcgcgatattgtgtcgcaaagcatcgcacagctcggtcagtacgtgcatgacctggacaccgggtacggcaaggagcgcgaggacaagcggttctggttctcccccaatctccggtatccgctcacctatcagcacgagaagcaggagaccccctgtgctgacgaaaacgtaggatccctcgatggcctagtggctcttgtcgtgaaggaaatcgggtttgactggtcgcgcgttcagtccgtgacggtcgagtgaggagatgcgccgatgaatgcgaatacgctcctgctccgcctcgaaggtcctcttcaatcgtggggagaccagcaatcgagattcgtcgtccgaaggacttccgaagctccgaccaaatcggggatcgccgggctgctctgcgctgcaatgggcgtgtcgcgctccgatgctcggcaacggctcatcaagttgaacgctttgatgatgggcgtccgcatcgatcgtccaggcgtgcgctggtgggactaccacacggtgggggcgggaatgcagatgcaaagcgcggagggaatcggaaagaccaaacccggcccgattctgacgcgtagggaatacctctgcgacgcgagcttcgtggttgctttgcgtggcgattcctcactgatcgtttcgttgcacaaagctgttcagcatccggtgtggccggtgtatctcggccggaagtcgtgcgcggcatcgcttccactggtgggctgccatgacgatccggatgtgggcgggtttcctgacctggaatctgcgcttcgatctgttccctggcggagccgccacgcgggagaggccgtgcccgatgtagtcgaatgcgtgatcgaatggcggggtgccgcagcgggtgaggttgctccactagacggggaagtctggtacgatgtcgcagactcgtttgatgtgccagcacactccccaagaatggttgttcgcaagaagatgggcgtcggctccggcacggacatccgagtcggtgcggcacgccagagtcgccttccggcgccgctgcgcccccgcgccgattacgcgaatgctgagtatcgccggaagcgtcagagccgcctggacgcagatgggggcctgtgtgttttctgcaagtctccggcgacgacggttcagcatgtgacgtatcgccgcgccggcggcgatgaggagcaagatgatttacgctcgctctgccggttgtgtcacgacgcggtgacgatgatcgagtacgggatgggcatggggctcgaccggatcaaccccgaagacagacaatggcgcgaccagattatcgccaagcgtgaggagatcattcggtttcgttcgctggagactcgacgtcgacggcttagcgccgaggaggtcgaatgatcatgtatcactcctatctgctcattgatactggtgacaatccggaccgcccgaggcccgggcgtctctggttacgaaatgtctatcgagtacaccagcggctttgcatggctttcccgaatgatgccagaaagcgagaggatccagagtttctcaaaccgtacgatccgaacggctttgtccacgttcacggcagccgcacaaccgaccaggcgtttctcttccggattgacgcgcatgcggggggcagcgtggtcatcgtgacacagtctgccgtaaaaccggattgggcgtatgccttccagaacgcgatgtatcttctgcatgccccgccgtcggagccgcgtgaggcacaactcacgtttccagccggcacgctgttgggattccggctgctggccaacccgacgcgccggttgcgagagagttctcgtgacgccaagggagaacctatcgaaggacgatgggcgggaaaacgggttcccgtgccgacaggcaagctggatgattggctgacacggcgatcggagcgttgtggttttgccgtcgagactttgtgggaagctcggccgggatttgtttacttcagcaagtcggcgagccggggcgagggacagtgccttagatccgttcgatatgaggggaagcttcgcgtcagcaactctgcagcatttcgcgagacgcttatccggggcatcgggccgggcaaggcgttcgggttcgggttgctgtcggtcgcgccggtgcgcgaggggggctgaatggggcatgcgtgaagggtgcggctctttggcaagtgaatagtgtggtggccaatggggaggacaggccatggacgatctgcatcggttgcccaggtttggggacagcctggggtatctgtacgtc

SEQ ID NO: 892 - DNA, 3736 bp, Artificial Sequence
  Synthetic Oligonucleotide
caatccggggcggagccgaagtcagcgcaagggaaaggagcctgcccgatgagccagaccgacgcgttcgttttcaagctgcaaacgctcaaggagggcgagctttcggtgttgcgcggcctcgcgggtaggcggcttgacgaggcgctacccggatttgacctgtttaccggcctgtggtggccgctgcggcagcggagtcccaaggtgccgagtcgggaaaccagttggctggtcgccaagcttttcgccgcatttcccatcaagcacagccggccggaagaggaagaccagcggcccacactggcgaagatccttggccgcgttgagccgcgtgacgaccacggcaacaagcgctttcgtgcccgcttcgacaccttgctctgttcgtcgctttcaagtcttgagccgcacttgcgctgggccttgtcacaggtggacgacgcggcgaggtctggccgcacgttcggcctggactgggtggaactcttggacgacctctggaagtgggagcgcggtggtgatcgcgacgtgcgcgagcagtggaccgatcaatatctgaacgcagtcaaccaagcgaaaggagcgacacatgctgattgagatccacatgattcagaatcacagcccttcgaacctcaaccgcgacgatctgggcgcgcctaagacctgcgttttcggcggcgtcacgcgtgcccgcatctccagccagtgcctcaagcgcagcatccgcaacccgggcaacccggaaaaccccgacgatccagagagtccgcgaaaaggtggaagcatgtttgccgattctgtgcgaaccgtactcggcgagcgcacgaagatgttcccttggctcgtcgagaaggaactggagaaggctcaggggcggttcagggcgggcaacgaaactgacgcggatatcgagaagcagaagaagggtatcgttgctgcatgcaggactattgcccgtgcggaaggcaaagcagtgtcgggtaagaaagagaagcaacagaaggacaagcgaccacagaccccgcagctcatctttatcggtccggcacaggcccgatcctttgtcgagaagctcttggaactgaagcagtcgatgcggtcttgctacgagtacttccttgacccggcaacagtcttcgagtccttccttgaaccggagcttgcgaagacggggttgacggaagagcaacaggaaagggcgctgaaagcagggtggcggattcgtcacaccgagggccgtttggcggagctgcgcaaacttttgccttcacaagcagaaaccgatgaggccgacgccaccagtggcgccagtaaagacccggtccaaagtccgcccccgattgacgacgagggcattgcttctgagatcgccgcagggttggcggtgttggccgtgcaaggcagcgagaggttttcccagatcacctcgcccaggggagccaggggcgagccgcagttggacatcaagcgcgacaaaccaaaggagtacgaagaattcgtgaaggccctgaggcaagctactctcaaggtctcggttgacattgccctcttcggacgcatgacgacctctgactacatcgccaacaccgaagctgcgatgcaggtggcgcacgcgatctccactcacgcggtcgtaaacgaaacggactactggacggcggttgatgatctcggcaaggccggaggcggcgcgggccacgtcgacgaggcgcagttcaactccgcgtgcttctacaagtacttctccctcgactgggatcaactcgttagcaacctcgcagggccccagccggtcgagaacgaagatacagagggccacgcgcgatgggagaaggaggtgaaaccggaagcgcagaagctcgccgcctgcacgctgggtcatttcattcgcgctgccgcgttgaccacgcccaccggcaagcagaactccttcgcggcgaacaacgaaccctgtggcatcctcctcgagatcaagaaaacaaaggttccaaccaactacgccaacgccttcgcggagcccgcggaacgcatcggcaagccggatgacgacgcggccgacgagaagagctgcgagggtcgcagcgtcgcgtgtctcgcagatcacgtgcacgccatccgcaaggcatacggcatcgactcgaccctgctctggtacagcccgaagctgtggcggttcccattcaagtactgggagcgtgctgaggatggcaagaagacgaaggccaagctcgtcacggattgccggttcggtgtactcggcggagaggacgataagccagcgggcctcgtcgaagccgtcgtcgaggcactcgggctgaacgtgacatgggctaaggtgaaggacgctggccaggcaggagttcaggcatgacggacaccgtcaatacccttttcctgcgtgtcgaagggccgctccaggcgtggggggacacgtccaagtttgtcatccggcgcacgatggaggcgccaaccaagtccggcgttctcggcctgatctgttgcgccatgggactttcacgcgaagccgcacgcgagcgcttgcccgaactgaacaagcttgccatgggggtgcgcgttgaccggccaggcatccgttggtgggactaccacactgtgggcgctggcgtcgggctgctgaccgccgaaggcaagctcaagaccggtgcgcaaggcacgctcatcacgcgccgcgagtacctcgccgacgccagctttctcgtagccctgcacggaagccacgagacgatcgtgaacgtcgccaaagccctgcaggccccgaaatggccgctgttccttggccgcaaatcttgcccgccggccgtcccggtgcttctcacacgaagacgtgatgacggcggtaccgagccggaattgggccgcttcgacgatccggaagctgcactgaagtcagtgccgtggcggccacgcttggcatcgattgacggcaaggctccatcgcgtgaccttactgctctccttgagtggcagccgccagagcggaagccatccgcgccagatgaagccgaggtctggtacgatgtgccggtctcctttgatccccccgtgcacgatccgcggctcgtgatgcggaccgccatcgcggtgtcgcctggcgaagcaacgcagcggccggtgccgcgaccatcacgtcctcgcgctgactacgccaaaacggaattcaaaaggcgccgggggcagcggattaccgacgaccacggcctgtgcgtcttctgcaagagcccagctaccacggttcagcacgtcacctaccgacgtgcagggggcgccgaattgcgcgaagaccttcgctcgctttgccgcctctgccacgacgcctgcaccatgatcgagtatggcctgggcatgggcctcgaccgcatcaaccccgaggaagcccgctggcgtgacgccatcattacgacgcgcggcgagatcatccgatttcgttcgctggcaacgcgtaagcgcaagctgcagcccgaagaggtcgagtagccatgtacctttcctgcctgttgatcgacgttggcgcgaacccggatcggccgagaccaggccgcctgtggctgcgcaatcctcatcgcgtccatcagcgcctgtgcatggcgtttccctcaacagaccggaaaaccaacgatcccgagtttctcaagccgttcgagccggcgcagtttgcacaagaccaggtccacgtcgagcgcaaggatggcgcggggtttctcttccgggt

SEQ ID NO: 893 - DNA, 3725 bp, Artificial Sequence
  Synthetic Oligonucleotide
gaccggccgcaaggtaacggacgcggaaatgcagtgcgtgaatctgcagcgcgacaagttccacggagactggaattacaccatccgaccccaatcgcgataggcacattgatacctttatttatttacactgccttacggcatcgaggccgatcgtttctggttctcgccgaatctgcgccatcgcctgacctggatcgacaaaagccagaaggaacacgagcaagaacaatccgtggtcggttccgacgagttcggcgagttcgatcagttcatccataaggtcatggacaagctcggggcaaccggggcgcctgcggaggcggcgaaatgaccgacgccaacacaatcttcctccgcctggaaggccccctccaggcctggggcgacacgtcgaagttcgtcatccggcggaccatggatgccccgaccaagtccggggtgctgggcctgctctgctgcgccatgggcctgtcgcgtgagaaggcgcgggaacgcctgccggagttgaacgggcttgcgatgggtgtgcgcatcgaccggcacggcacacggtggtgggattatcagacggtaggagcgggaatcggcatgacaaccgctgggaacgaagtgaagaccggcgcccagggcacgctcatcacgcgccgggagtacctggccgacgcgagctttctcgtggcgctccagggtgatgcgaagttgatccatgaccttgccgcggcgattgcgtcgccgaagtggccggttttcctcggccgcaagtcctgcccgccgagcgtgccgatcctcgtgacgcgaaagcgcgaggacggcacctgcgagccgcatatcgaaacgggcaggtccctgcttgatgccctcaagtgtgttccctggcaaccgcgcctgcccaactttgagcctgacaagaagcctgataagctcgcctgtatcctcgaatggcgggcgacggacaccgagccggaagcccccaatgatgccgaagtctggtacgacgcgcccgtcgcgttcgatcctccggtacatcatccgcgtttagtcacgcgcaccgaactcaccagcggagcgaacggtgtgtccaccgacggtgccacgcaagagcgtgtgccgcgtcccccccgtccgcacgcgaactacaacaacgctgaatggaaaagcgagaccctgattgccgaccccgccgatccgtctcgcaaggttcccaaaggcatgaggccgcgccgccttcagcgtgaccacggcctctgtgtcttctgtaaagccccggcaaacaccgtccagcacatcacctaccgaagggccggcggagacgaaaccctggaggacctgcgttcgctttgccgcctgtgccatgacgccgtcaccatgctcgaatacggcctcggcatggggctggaccgcatcaatcctgaggagccccgctggcgcaagccgatcattcaaaagcgggccgagatcgttgaatttcgctcgctggagacccgccgtcggcgtcttgccgccgaggaggtggaatagccatgtaccggtcctgtctattgatcgacgtaggcggcaaccccgaccggcctcggcccgggcggtcgtggctgaggaaccgctatcatgtccaccagcgcctttgtatggcctttccgtccgcgtcccggaaggccgaagatagggacttcctccaaccgttcaaaccggatgagtttggtaaaggccaagtccatgtgaagcgtgccgtgggctcgggatttcttttcctcatcgaacctctccgcggcggcagggcggtaatcatcgtgcagtctgccatagagcccgactggtgctatgcctttcacaatgcggattatctgctggcagcgccccctgaggtgaaaccattcgacccacgcttctcggaaggccggtgccttcggttccgcctcgcggcaaatccgaccagacgtctgtgcaagcattcaccggatgcaaaagaagaatctatcggaaagcgcgttcccgttccgaccaaccggcttgtcgactggcttgcccgccgggccgaatcggcaggattccatatcgaggaagacgccacgacccttcagccggggttcgtctatatgaacaaaaacggcaaggggcagcgtctgcgttcggttcttttcgaaggcctcctccaggtcacggacccggatgcctttcggcagacccttatccgcggcatcggttccggcaaatccttcgggttcggcctgctttcgatcgcgccggccaatactgcgggctcggacgaggcgacatgagagtccgggacctgcagattctgcccaagttcagggacggctggagctatctctacgtcgagcattgccgcgtcgaccaggaagtccgggccattgccatccacgatgcatccggcaaggtgcctgtcccctgtgcgaatctggcgctgctcatgctggggccgggcgtatcgattacgcatgccgccatttccgtgttggcggaccatggttgcctggtcatctggtgcggcgaagagggagtccggttctatgcggcgggcatgggcgagacgcggagcgcggcgaacttcctgcatcaggcgcgggcttgggcggatgcggatcttcgtttgaaggtggtgcaccgtttgtaccagttgcggtttgccgagacgttcgatccgaagctgaccctgcgccagatccgcggaatggaaggcgtccgtgtccgggatgcctatgcccgggccgccagggaaaccggcgtgccttgggcgggccgcagctaccggcgtgacaagtgggcccatgcggacccggtgaacagggccttgtcggcggccaattcgtgtctttacggcatttgccatgcggctgttacttcggcgggattctcgcccgcgctcggcttcatccataccggcaaaatgctgtccttcgtttatgatgtcgccgatctttacaaggcggaaatttctatcccagcggcatttcgcgcagcagcgcaagagcaggccaggctggaacgacatgtgcgcatctcgtgccgtgacctgtttgtgtcaacaaggcttctggagaggatcattcctgacatccaaaaagcgctgatgttgccaaagaaaggcgcgacaagtgatgacccattcggccaggacgccgccgccccaggcgctttgtgggaccccttgacgggagaagtagagggcgggtgcacctatccgttggaaactgatgaaacggaggccaacgatggtggttctgattcttgagcgtgtgccgcctgggttacggggtgaattgacacggtggtttctggaaccgaagacaggagtttttgtggggagggtttcagccatggtgcgcgataaactctgggaaaaagcctgcgggaatgccaggaggggcggttgtgtgatgatgtattcgagcgacaatgagcagggttttcggattcggagttggggaaaatcggcgcggtcggtcgaagacttcgaggggctatttctcgtcagggtgccgtaaattcaggtttattcagtagcgtccccacgcacgtgggggtgaaccggcgggcgctttgagtcgcattaaaccacccgcagcgtccccacgcacgtgggggtgaacccggcgcgggcgaatgggcgtggacaagcccgtgagcgtccccacgcacgtgggggtgaaccgtagcgcagcagaagctgctccccctcgggccaaagcgtccccacgcacgtg

SEQ ID NO: 894 - DNA, 3707 bp, Artificial Sequence
  Synthetic Oligonucleotide
tgaggcaagagccctctgggtggtaggtttctcaacggtgcagaacgacaagtacttggaggcgactgaatgcctagtgccttgttcccgaccacctggccaacctcacgagcttgtcgctgcgctcgagcaatggcagaaggaaggtacaagtcttgtgcgtagactccgcccatccggcgagaagaagtcttcccgaaagcatgtagagatttcggcaagcctcgcaagcattcgtccccacgtcgaaggcagagtcgcggagaaactggacgagttgctcgcgaacgccgagtcggcgtgggaacgggccgcacaggaataccgccccatgatcgaggtggtcgcagaatcgatttctcccggctttacggtggccgcgttgcagcggcgacggcagattgcccacgcagtaccggatatgcagaccgggacgaaggagtccaagaagccgaacccgaagaaaggaggggacaagtgactgcaacggagcaatatgttgatgtcttgactcgcctgaagcccggcgaactcggactgcttcgcgcgcacgccgggcgcggacttgacgagtcggtggctggattcgatttgttcgccggcctttggtggccactgcggcagaggaacgaacgcgcacccaagcgcgaagtggcatggctggtcgcgaagctctacgcctgttgtcctatcgaacatttgcccggtgctgctctcgctcgccagttggggcactgtcagcccaacaaggaccctgcgaaagaacgattccagaaggcattcgaccggatactcacgctgccgctcgatcaaatcgaacctccccttcggtgggcgctggcgcaggtcgcatcgaacgacggaagagtggactgggcgaagcttacggatgatctatggcaatgggaacacgaatctacccgcctgaggtgggcggagcaattcttgggatataacgaaaggggataatcatgctgatcgaaattcacgccattcagaatcacagcccggccaatctgaaccgggacgacctgggcgcgcccaagacctgctactttggcggcgtcctgcgctcgcgcatctccagccagtgcatcaagcgcagcatccgcatgagcgacgagttcaaagcgctgctcggcggcgtagctacgaggagattggcccagttgatcgctggaagtgacgcggattcagggcagtttgaaagggcgatgaggattctcaaaatctgtggcatcgcgcccaaagagaagagaggtggcggcgatgaggacaatctcaagaatgaggagaagagcgctggacgcgtttacacgagccgcaaagcgattgaagagatggccagactcttgaaacaaggcgggaaggaatccgaccaaaaactggcggcggagttcgcgaagctgatcgctgagcataccgccgttccggacatggcgctctgtggccgaatgctggagccgaagaaacctgagaaaagcaagaaaggcagatcagacgacgcctccatggcaaaggaggaaggaggcgaggggtccaaggataagggagtatggaaaggactcgatttgacggtcgagggtgcccttcaggtggctcacgccatttcaacgcatgaagcacgccctgaagtggactactttgtggccgccgacgatatcccgggcgacgatgggggggcggcctacgtggacgaagccatgttcgcctcggcctgcttctacaagtatttctcgatccattgggagacgctggtcagtaatctcgaaggctttggcaccgatcacaagaagttggccgcccatacggttggggcgttcattcgtggggcagcgatggtgagtcccacgggcaagcagaacagtttcgccgcccacaatccacccgatgggatgctcatcgagatcaggaacacgccggtcagctatgccaatgcatttgccaagccggtgactcagggcgagcgcgacatcattttgcagagcgttgcccagttgggtcagtacatccacgacctggacaccggatatggcaagccgcaacaacgcttttggttctcgcccaatctccgatgtgagttggtggcgcagatcaaggctgataagaatggagaaaagaaacagaaggaagtcgcgctgaccgagaaggaaaacaatgtcgagtccctggacgaactggttcgttgcgtgatcaaggccctccctggaaagctcgattgggccgaagtacagagggtggtagtcaactcggaggtggctgcatgagcgccaataccctcttcctccgcttggaagggccgatgcaggcgtggggtgtccaggaatcgaagttcgtcatccgccggacggcggaggccccgacaaaatcgggagtgatcgggatgctctgcgcggcattgggcgtgtcccgtcccgatgctggggccgagtggcttccgaagctcagcgcgttacgcatgggcgtccggatcgacgcaccgggcgtgcgctggtgggattaccataccgtgggggccaggatggatatgcgcattgccgaaggcgagggaaagaccaagcccggtgcgatactcacccgccgcgagtatctgtgcgatgcctctttcctcgtcgccctgcagggcgagccgacgctgattgctgaactgggccaagcaatggagaatccgaagtggacgctctacttggggcgcaagtcttgcccgccgtcgcgcccgttgctccaatctgcgcccggcgcttttcccgatttggtttccgggctgacctccattccttggcggccacggcttggggacgacaggccgcccaagacagtggattgcctgctggattgggagccctcgaccgaacagtccgacgcgcccgacgatgcgctcatctggtacgatgtgccgctgacgttcgagccgccctcgcatcggccgaggttcgttatccggcggacattgcaggtgggtgcagagggcgacgtccgaatcgcggaacgacccgcgcagagcgaaaccccacggccggttcggccacgcgcagattacggcaacacggaatacaggaagaagcgtcaggagcggctcgaccatgacaaccatctctgcgtcttctgcaagtcgcccgcaacgacggttcaacatgtgacctatcagcgtgccggcggaaatgaaacgcgcgaagacctgcgttcgctgtgtcgcctgtgccacgatgccgtgacgatgatcgagtacggcttggggatgggtctggatcgcatcaaccccgaagaccagcagtggcgcgagcagatcatccgaaagcgaaacgagatcatcgaattccgctccctggaaacacggcggcgcaaactggccgccgaggaggtggaatgatgtatctgtcgcatctcctgattgacgtaggggggaaccccgaccggccccgcccagggcggctttggctgcgcaacatgtaccacgttcaccaacggctctgtatggcgtttccctcgcgggaacgccgcaagaaggaaaacgacccggattttctgaaaccctattcgcctgacgatttcccggaaactcgccatattgcggacaagaaggcggaagaggccggcgctgaagcgctgcgccacgtgcactcgccacgcaattccgacagcggtttcctgttccgggtcgacccgttgcccggcgcatctgtggcaatcgttgtcttgtcggctat

SEQ ID NO: 895 - DNA, 3669 bp, Artificial Sequence
  Synthetic Oligonucleotide
cgggccgctgcttttgccgtcgccaaagctaaccggctgggcgccgacgccgctccgtcagcaactcatccaccagggaagtgccgggcttcaggtagcgtcgggcgcggcgttgcgcgcgctggatgcgccgccgctgggtcgtgattcgtagttcgtcgtcttggatccgcaggaggacttcatcccccaccttgatgcccagcgtcctacggaagggagccgggataacaacgcggccattctggctcacacggacccgggcttcttccgccatgcctcactctagtcctaatgaacccatcctagcgcattgccacaaaatcaatttccttccacgcggcgctagagtttcccttttcacagtcaggttggcaggacaacgggtagtgggtcaatttgacgccgtagcggcgagctcgcctcgccaaatggctctcacgttgcctctgtcgggagtggtgtgcggcaaggggctagggaaagaagcccgaagccgaaggctttgccgtgcccaatgccgcccacgatggtttctctaaagctatccgcgtctttaaccgtaagcgtcccctccaataaggctgagcgaaatttcatgcgatcgcccgccggcctcgagtccgatcggttccctgcgccccacccgatttgcaagacgcggaaagcttccacctggaagccaccttggtcgcccttggcggcgaaccattctcgtatcacatcgtcggggttctggtccttatcccaggtcagcgccacgcgcttgctttgggccttcgggcgaccctgcttatctgtcccctctcgcgtcctcgtaagatcaactccgttggtgctggtttttaccttcttgctcagattgacgcggatacggaagcgaagccgttggcccttcgcgaagcgggggtcgaattcctccacctgagggggagcggccagaggattcagaagaaaacgggcgttgtggaaggcgtagtcccagtcaggcttcacggcggagttggactggaccagaatcacgacccgcccacccggttgcgggtcgatccggaaaagaaagcctgaatccgcgccgcgttctacatgaacttgcttctccccaaagtcctcgggtttgtagggctggaggaagtcacggtcaccggattttcgggatgccgacgggaaggccatgcaaaggcgctggtggacgtgataaaggtttcgcagccagagtcgcccgggccggggccggtcggggttgctcccgacatcaaacaggaggcaggacaggtacatggctattcgacctcctcagcggcaaggcgtctgcggcgggtttccagggagcggaacttgatgatctcgtcccgcttctggatgatcaagtcgcgccaacacggctcttcggggttgatgcggtccaggcccatgcccaggccgtattcgatcatggtcacggcatcgtggcagaggcggcagagggagcgcaactcaccgatgtgttcagcgccgcctgcattacggtacgttacatgttgcacggtcgtggccggagacttgcaaaacacgcatagatgatagtcgttgtcgagccgctccttccgccgctttttgtactcagtgttggtgtaatccgctctggggcggggcggcggcggcgtgtcgctctgccctggctggggcgcgagcgttagttgcccgccgtcgccgacgcgcagttgcgtccgaacaacgaatcggggttggtgcgacggcgggtcgaatgtcaccggcacgtcgtaccagaccagagcatcatcgggggcttctgattggtcgggtgttggctcccaatccagcaggcaatcgagggcttgcggccgctggtctccctccagccgtttgcgccaagggaccgacgtgagggctgaaaggaggtctggaaagtccccagtgggggggatctccagcaaaggccgggaaggcgggcagcattttctgccgaggtagggcgtccatttgggcgctttgattgctgcctccagttcggctaccagaggcgggtcgccgcgaagagcgacgagaaaggatgcatcgcacaggtattcgcggcgggtgagcatggccccgggcttggttccgccttcggccgtgcgcatccgcatgcctgcccccagcgtgtggtaatcccaccagcggactccggggacatcgatgcggacgcccatgcgcagggggttaagtcttggaagccagccttcgggggccgcagggcgggagacgcccaatgccgcgcaaagcatcccaatcacacccgacttggttggggcgttaccagtccgccgaatcacaaacttcgactgctgatcgccccatgcctgaaggggaccttcgaggcgaagaaagagggtgtttgcgctcatcaggccacctccgagttcacaaccaccttccgaacctcctcccagtcacagccaatctcctcgatcaccgcctggatcaacgcgtcgagcgacctgatattgttatccgtgagcacgatctcgcgcagtttctcctttccgttttcgttctccttgacgcagactgtcaacggatagcgtagattgggagagaaccagaagcgctttgccgggttgccgtacccggtgtccaaatcgtggacgtactgcccaagttgcgcgatgctctgggatacgatgtctcgttggtcttgagtcactggtttggcaaaggcattggcatagctgatcggggtgtttctaatttccactagcaccccatcggggggattgtgcgcggcgaagctgttctgcttgcccgtgggattcaccaacgcggctccgcgaatgaatgcgccgacggtgtgcgccgccaagtttttgtggttcgcaccgtaggccttcaggtttttgaccagcgtttgccagttgatcgagaagtatttgtagaaacaagcggaaccaaacaatgcctcgtcgacgtaaccagcgcccgcatcttcgccgggtacatcatcggcggcgacgtagtagtcaacttccgggcgagcctcgtgggtggatatcccttgggcaacttgaagcgccgcctcgacagtcgtgcctttgagcaccccggtctcaagcatcctgccagcgagcgccatgtccggcacggcgacgcgttcacttatgagtttcccaaattcctctgccagtttctcatcggtttttccgtcgccgtcctggaggagtacgcccatctccgcaatcgcctcgtgggtcgtgtaaacaagcatgtcgctcctggcgtcttcttcgctccggggattgataccacacttctcgagaatctttgccgcgcgtttactcgcggcaccttttccggtcaccttttcggagatcaatttcgccaattgccgtgtgcggatcccgccgagtaactgcttgaattcgtagctcatgcggatgctccgcttcaggcactggctggagatgcgggagcgtaatacccctccgaaatagcaggtcttgggcgcgcccaagtcgtcccggttcaggttggccgggctgtggttttgaatggtgtgaatctcaattaacatgacggtcctcctttgaaggcttcaaaaattcctctgcccacttgagccgcgtggtttcgcgttcccaaatggaaagatcgtttgtcagcctcacccagtcgagcttgaggtgtttagaa

SEQ ID NO: 896 - DNA, 3668 bp, Artificial Sequence
  Synthetic Oligonucleotide
ctcatgctggactgggtctcgatcaatcggtacaggggttcgatttgttcgccggaatttggtggccactgcgacaaaatagctccaaagcgccccgccgtgaggtggcatggttggttgcaaaaatacatcggcttcggcaaacctcaaaaaagattctggttttcaccaaatctccgttttccacttaacgccgtcaaagaaggtaaggaatctgcactttccgaacaaaatataatgtcccttgaaggtctgattaccagcgtaatgaaagaggtcggatacgactggagcgatgttcagaaaagcattgtaaatcctgaggtaccgtcatgagtgttaacaccctctttctccgtttggaaggaccattgcaatcgtggggtacggagcagtcgaaatttgtgataagaaggacaagcgaagcccctacgaaatcaggaataattggaatgtgttgtgcagcgctcggcatttcacggcaggaggctgcaaacggttggcttcaaaaactgagtgagcttcgtatggcagtccggattgatgtgccgggggtccgatggtgggattatcatacggttggagcaggcatgatgatgcgcaccagtgaaaaccgaagcaagacaaagccaggccccctggttacccgacgcgaatatctctgtgatgcaagttttctggttatccttcagggtgagcatagtctggtcgccgaattggagattgcagtcaacaatcccaggtggccaatttacctgggcagaaaatgttgtactctatctcgtccactgctggtgcatccggcaggcgattttccgaatttggtttcagcactgaagtccataccctggcaaccaagacttgccggtgatccgatgccgcaaacagttgattgtcttatcgactgggaaccgacaatcgatcaaccagagccgccagacgatgcgctcattttctacgatgtgccgctgacattcgatcctccatcgcattgtcctcgttttgtcatcagagagtctttgatagtggggaaaaaccgggaaattggcattgcagaaaagccggcgcagaataaaacgccacgaccgtcacaaccacgggcagactacagaaatacggaataccgccatgctcgcataaaacgtcttgatgctgaccaccatctgtgcatactttgtaaatccccggccacgaccgtccagcatatcacctaccgcagggccggagggaatgaaaccccggatgacctccgttccctgtgtcggctttgtcatgatgcagtgacgatgattgaatatggcgcaggcatgggattggaccgcatcaatccggaagaaaaaaagtggcgggaacaaatcattgagaagcgaagcgaaattattcgttttcggtcaatagaaacccgacggcggcatctttccaaccaggaggtctaatgtacttatcaacgcttttgatcaacgctggcgatcatcccgaccgaccacgccctggaaggtcatggttgcggaatgtttacagggttcatcagcggctgtgcatggcatttccctccggggagcgaaaacaggctgatgaggattttctcaagccctataaaccggaggattttggatatcatcaagttcatgtaccacgaataaaggatgccggattcctgtttcgtatcgatcccattccgggaggcagggccatcattctggtgcagtctgcagtggaacccgactgggattttgcattccataatgctatgtttctgctgtctgcaccgcccgatataaagccttttgatcctcaattttcaattgggcaaaaactactgtttcggctgacagcaaagccaactaaaaaaatagacacaaaaagtgggcctgatggaaaaaagcgtaacggaagacgagttccggtaaggccagaaaactttttggaatggctggttcaaaagagcattcggtcgggattctctattatgagtgataatattatcattcagacatcctatatcttttttcacaaaccgaatacacaacaggaaaattatttgagtgaaatatcaccagggaaaggcgattatcaagctcgcctgcgattggtccgttatgatggagttctcacaattgatgacattaacctttttcatttagctattgaacgtggcatagggtcaggcaaagcctttggttttggccttctttcgttagcacaaatgcagtgtggaacgctatgaaaatcaaggacctacacattcttccgaagtttcgtgatggtttgagttatctctacgtggaacactgtcgaattgatcaagaatctttggctatcgccatccatgacgcgcgcggaaaagtacctgttccctgtgcgaccctggctctcttgatgctcggtcccggtgtttcaataactcacgccgcaatatctgttcttgctgatcatggttgccttgtggtctggtgcggggaacagggcgttcgtttctatgcagtgggcatgggagagacgcgcagttcagctaacctgttgcaccaggcgaagatgtgggcggatgataattgtcgcatacaagtgatacgtcgtctttatcagttacgatttcccgaaaaattggatacatccctgacccttcagcaaattcgcggaatggaaggattacgggttcgctcggcttattccagagcagccaaggagtccggtgtctcctggaccggtcgcagctacaaatctaacgaatggaacagtgcagaccccgttaacagagctttgtcaactgctaattcctgtctttatggcatctgccacgcggcagtggtgtcagcaggcttttcgccggcgctggggttcattcatacggggaaaatgttgtcattcgtttatgatgttgctgatctttataaaaacgagattacgatcccaattgcatttcgtgttgttgctgaatccaaagatgttctggaaaaacgtgtacgggtggcctgcagggatatgttcgtttctatccgcctgctgaaacgaatcattccggatatccagatggctttggggctttcaacgcagaaaacagcagatgataatgaaccattcgaccgggatgctaccgcaccaggttctttgtgggatccggagttaggcacggtggaaggcgggcgctcgcatcctctggaaatggatcaaatgactgaaagggaagatgatggtagttttcatccttgaaaatgtgccactgaggttaagaggagaattatctcgctggttcctcgaaccaaaggcaggtgtttttgtggggaatgtttcggcaatggtaagggagaagatttgggaaatggtttgcaaacaagtaaaggaaggcggttgcttgatgatctatcgcagtgataatgaacagggatatcaaattcttagttctggtcaaacattgagagcaattgaagacttcgaaggattattgcttattcgggtaccacagatttaatattttttcagtattgtccccacgcacgtgggggtgaaccggtgtcattgtttcatcagggagatatgtctggattgtccccacgcacgtgggggtgaaccttgtggccagcgtcgccatttaaaatagttgagattgtccccacgcacgtgggggtgaaccgacaatgggtgaagccgaagcgcgcatggttacattg

SEQ ID NO: 897 - DNA, 3645 bp, Artificial Sequence
  Synthetic Oligonucleotide
acggacgcggaaatgcagtgcgtgaatctgcagcgcgacaagttccacggagactggaattacaccatccgaccccaatcgcgataggcacattgatacctttatttatttacactgccttacggcatcgaggccgatcgtttctggttctcgccgaatctgcgccatcgcctgacctggatcgacaaaagccagaaggaacacgagcaagaacaatccgtggtcggttccgacgagttcggcgagttcgatcagttcatccataaggtcatggacaagctcggggcaaccggggcgcctgcggaggcggcgaaatgaccgacgccaacacaatcttcctccgcctggaaggccccctccaggcctggggcgacacgtcgaagttcgtcatccggcggaccatggatgccccgaccaagtccggggtgctgggcctgctctgctgcgccatgggcctgtcgcgtgagaaggcgcgggaacgcctgccggagttgaacgggcttgcgatgggtgtgcgcatcgaccggcacggcacacggtggtgggattatcagacggtaggagcgggaatcggcatgacaaccgctgggaacgaagtgaagaccggcgcccagggcacgctcatcacgcgccgggagtacctggccgacgcgagctttctcgtggcgctccagggtgatgcgaagttgatccatgaccttgccgcggcgattgcgtcgccgaagtggccggttttcctcggccgcaagtcctgcccgccgagcgtgccgatcctcgtgacgcgaaagcgcgaggacggcacctgcgagccgcatatcgaaacgggcaggtccctgcttgatgccctcaagtgtgttccctggcaaccgcgcctgcccaactttgagcctgacaagaagcctgataagctcgcctgtatcctcgaatggcgggcgacggacaccgagccggaagcccccaatgatgccgaagtctggtacgacgcgcccgtcgcgttcgatcctccggtacatcatccgcgtttagtcacgcgcaccgaactcaccagcggagcgaacggtgtgtccaccgacggtgccacgcaagagcgtgtgccgcgtcccccccgtccgcacgcgaactacaacaacgctgaatggaaaagcgagaccctgattgccgaccccgccgatccgtctcgcaaggttcccaaaggcatgaggccgcgccgccttcagcgtgaccacggcctctgtgtcttctgtaaagccccggcaaacaccgtccagcacatcacctaccgaagggccggcggagacgaaaccctggaggacctgcgttcgctttgccgcctgtgccatgacgccgtcaccatgctcgaatacggcctcggcatggggctggaccgcatcaatcctgaggagccccgctggcgcaagccgatcattcaaaagcgggccgagatcgttgaatttcgctcgctggagacccgccgtcggcgtcttgccgccgaggaggtggaatagccatgtaccggtcctgtctattgatcgacgtaggcggcaaccccgaccggcctcggcccgggcggtcgtggctgaggaaccgctatcatgtccaccagcgcctttgtatggcctttccgtccgcgtcccggaaggccgaagatagggacttcctccaaccgttcaaaccggatgagtttggtaaaggccaagtccatgtgaagcgtgccgtgggctcgggatttcttttcctcatcgaacctctccgcggcggcagggcggtaatcatcgtgcagtctgccatagagcccgactggtgctatgcctttcacaatgcggattatctgctggcagcgccccctgaggtgaaaccattcgacccacgcttctcggaaggccggtgccttcggttccgcctcgcggcaaatccgaccagacgtctgtgcaagcattcaccggatgcaaaagaagaatctatcggaaagcgcgttcccgttccgaccaaccggcttgtcgactggcttgcccgccgggccgaatcggcaggattccatatcgaggaagacgccacgacccttcagccggggttcgtctatatgaacaaaaacggcaaggggcagcgtctgcgttcggttcttttcgaaggcctcctccaggtcacggacccggatgcctttcggcagacccttatccgcggcatcggttccggcaaatccttcgggttcggcctgctttcgatcgcgccggccaatactgcgggctcggacgaggcgacatgagagtccgggacctgcagattctgcccaagttcagggacggctggagctatctctacgtcgagcattgccgcgtcgaccaggaagtccgggccattgccatccacgatgcatccggcaaggtgcctgtcccctgtgcgaatctggcgctgctcatgctggggccgggcgtatcgattacgcatgccgccatttccgtgttggcggaccatggttgcctggtcatctggtgcggcgaagagggagtccggttctatgcggcgggcatgggcgagacgcggagcgcggcgaacttcctgcatcaggcgcgggcttgggcggatgcggatcttcgtttgaaggtggtgcaccgtttgtaccagttgcggtttgccgagacgttcgatccgaagctgaccctgcgccagatccgcggaatggaaggcgtccgtgtccgggatgcctatgcccgggccgccagggaaaccggcgtgccttgggcgggccgcagctaccggcgtgacaagtgggcccatgcggacccggtgaacagggccttgtcggcggccaattcgtgtctttacggcatttgccatgcggctgttacttcggcgggattctcgcccgcgctcggcttcatccataccggcaaaatgctgtccttcgtttatgatgtcgccgatctttacaaggcggaaatttctatcccagcggcatttcgcgcagcagcgcaagagcaggccaggctggaacgacatgtgcgcatctcgtgccgtgacctgtttgtgtcaacaaggcttctggagaggatcattcctgacatccaaaaagcgctgatgttgccaaagaaaggcgcgacaagtgatgacccattcggccaggacgccgccgccccaggcgctttgtgggaccccttgacgggagaagtagagggcgggtgcacctatccgttggaaactgatgaaacggaggccaacgatggtggttctgattcttgagcgtgtgccgcctgggttacggggtgaattgacacggtggtttctggaaccgaagacaggagtttttgtggggagggtttcagccatggtgcgcgataaactctgggaaaaagcctgcgggaatgccaggaggggcggttgtgtgatgatgtattcgagcgacaatgagcagggttttcggattcggagttggggaaaatcggcgcggtcggtcgaagacttcgaggggctatttctcgtcagggtgccgtaaattcaggtttattcagtagcgtccccacgcacgtgggggtgaaccggcgggcgctttgagtcgcattaaaccacccgcagcgtccccacgcacgtgggggtgaacccggcgcgggcgaatgggcgtggacaagcccgtgagcgtccccacgcacg

SEQ ID NO: 898 - DNA, 3574 bp, Artificial Sequence
  Synthetic Oligonucleotide
tccgaacgcggcttgaccggcgaaagcatcgccagactcggccagtacgcccaagatcttgttgaaggttacggcatctccgccgaacgtttctggttttcgccgaatctgtgccggcccctgccctggttcgaaaagagcaatggggaccacgggcaagaacaaaccgcggacggtaaacccgaagaatgcgggaagttcgatgagttcgtcaataaggtcatggaaaaggtgagggcgtccggaatgattacgggggtgttgaaatgaccgaaaccaacacccttttcctccgccttgaaggccccctccaggcatggggcgatacgtcaaagttcttgattcgccggtccatggatgcgccgaccaagtccggcgtgctgggcctgctctgctgcgccatgggcctgtcgcgccaggcggcgcgggaacgcctgccggagctgaacgcccttgcgatgggcgtgcgcatcgaccggcccggcacgcgctggtgggactatcacacggtgggcgcggggatcggcatgacaaccgccgggggcggtctgaagaccggcgcccagggcacgctcatcacgcgccgggagtacctggccgacgcgagcttcctcgtcgcgcttcaaggtggcgcgaagttgatcccggagatcgccgccgcgctcgggtcgccgaagtggcccgtctttctcggccgcaagtcctgtccgccaagcgtaccggtactcgtgactcgtaaacttgaaaaccacgagcgcgtgccgcacatcgaacggagcaagtccgtaaacgaggccctcgagtccgccccgtggcagccgcgatatgaaaaagatattccttgcgatgaacgccgcaagcgcccgaggacaatcaatctgccatacctgattgaatggcgacccgccgccgaaggcgacgtcgctcccgacgacgcggaagtctggtacgacgttccggtctgcttcgacccgccggtccacgagccgcgctttgtcctgcgcggcaccgtttctcctccggtcggcgaggcgctccagaggcctgcccccgccgtgccgcgcccgcgcgcgaactacgcgaaagcggagtacagaaagcgccgcgaagagcgaatagaagccgatgccggtttgtgcgtcttctgcaaatcgcccggcccgcgcatgaccgtgcagcacgttacctaccgcagagccggaggcaacgaaacccttgaggatctgcgttcattgtgcggcttgtgccatgatgcggtgaccatgatcgaatacggccttggcatgggactggaccgtatcaatcccgaggagccccgctggcgcgacaagatcatccaaaagcgggacgaaattatcaagttccgctcacttgagactcggcgccggcgccttaccggggaggaggaatagccatatgtacctgtcttctctattgatcgacgtaggcaacaaccccgaccggccccggcccgggcggttgtggctgaggaaccgctatcatgtccaccagcgcctttgcatggcctttccgtccgcgtcccggaagtacgacgatgcggacttcctcgcgccattcaaaccggtcgagtttggtaacggccaagtccacgtgacgcgtaccgcggactccggctttcttttccgcatcgatcctctccgcaacggccgggcgatgatcatcgtgcagtccgccataaagccggactgggactatgcctttcacaatgcgaaacatcttctggcggcatgccccgaggtaaaaccattccaaccacgcttcacggaaggccggtggcttcgattccgcctcgcggcaaatccgaccagacgcttgagcaagcattcaccggatgcaaaagaggaatctatcggaaagcgcgttcccgttccgaccgaccggttgattgagtggcttgcccgacggtccgaatcggcagggttctttatcacgcaagacgcaacgacccttcatcccgggtatatctatatgaacaaaaacggcaaggggcggcgtctgcgttcggttctgttcaacggccttttgcgggtcaccgacgttgacgactttcggcagacactgatatgcggcatcgggtccggtaaagccttcgggttcggcctgctgtcggtcgcgccggccgatcctgcggacgcgggggaggcgacatgagagttcaggacctgcatgtgttgcccaagttcagagacggctggagctacctctatgtcgagcattgccgcgtataccaagaagcccgtgccattgccgtccacgatgaatccgggaaggtgccggtcccctgcgccaacctggcgctgctcatgccgggaccgggcgtctcgatcacgcattccgctatttcggtgctggcggaccatggttgcctggtggtctggtgtggcgaagatggagtccgtttctacgcggcgggcatgggagaaacccggagcgcagcgaactttctgcatcaggcgcgggcttgggcgaatgcggaccttcgtttgaaggtcgtgcaccgtttgtaccggttgcggtttgccgaaaccttcgggccggagttgaccctgcgacagatccgcgggatggaaggcgttcgcgtcagggatgcttatgccaaggccgcccgggaaaccggcgtgtcctggtcgggccgcagttaccggcgggacaaatggaccaaaaccgacccggtgaacagggctttgtcggcggcgaattcgtgtctttacggcatttgccatgcagcgattacctcggcgggtttctccacggcgctcggcttcatccacacgggaaagatgctgtccttcgtttatgatgtcgccgatctttacaaggtggaaattacgattccggcggcttttcgcgcggcggcggaagaaaaacacggcctggaacgacatgtgcgcatctcgtgccgtgatttgtttgtatcaaaacggcttttggagagaatcattcccgacatacaaacggcgctgatgttgccgaaaaaaggaacaaccggtaaagacccgttcgactcggaccccgccgccccgggctctttatgggaccccgtcaagggtgaagtggagggcggatgtgcctatccgccggaaattgatgaaacggaggataacgatgcaggttctgatccttgagcgtgtgccggccgggttacggggtgaattgacacggtggtttctggaacccaaagcgggagtcttcgtgggaagagtttcagccatggtgcgtgataaactctgggaaaaagcctgcgaaaaagccagaggaggcggttgtgtgatgatttattcgagcgacaatgagcagggttttcgaattcggagttggggagaaacggcgcgctcggtcgaagacttcgaagggatttttcttgtccgggtaccgtaaatacaggctttttttagtatcgtccccacgcacgtgggggtgaaccgcggctcctccgtgtaggggtcgtcgtagacccatcgtccccacgcacgtgggggtgaaccgatattgaaacaggtaaaccagacgaatacgacatcgtccccacgcacgtgggggtgaaccgacgggg

SEQ ID NO: 899 - DNA, 3540 bp, Artificial Sequence
  Synthetic Oligonucleotide
ggtcggttcacccccacgggcgtggggacaacccttctcaaagccgcgctctacggcactcgaatcagagaaaggccctcgaagtcttccacctgccgggcgggatctccgtgcatgcggatggcaaacccctgctcccggttggaactgtggatcatcgtacagccgccgccccgagcctcttggcaaaccttctcccagaggaggtcccgcaccatccccgagacgctgcccacaaagaccccggccttgggttctagcatccacctggtcaattccccacgcacacccacgggcacccgctcaagaatcaggaccaccatcttcttccacctcctccggcgccgggtttccgaaattctgcccgccggctactcttccatcctcagagtcccagaggtccccaggcagggcagcatcccggtcataatccgcccccaaagcgattccagccttgtttttgaggtccaggataaattccagatcgaggataatctgcttcaagagattctgttcattaaaggcatcccggcaggcctggcgcacccgggtttccagtttatccaaaccccgggccgtctctctaaaagcgatgggaatggaaaccctggtcttgtacaggtcggcgatgtcgtagacaaaggaaagcatcttgccagtgtggataaaccccagggccggagataaacccactgcttggataccggcttggcagatgccgtagagacagctattggccgcggataaggcccggttcaccgggtcggctgcatcccaagcgtcccgccggtaggcccggccctgccaggggacgccgctctcccgggaagccagggcataggcctgccgcacccggaccccctcattgccccggatttgctgtaaagtgagattttctggcaggggctcagggaagcgcatgcggtacatccgcaggactaccagcagacgcagttccggatcggcccaaaggcgcgcctgctgcagcaggttgtcggcgctccgggtgagaccctggccgtgagagtaaaagcgcacggccccttcccccacccagcataccaggcagccgttatcagccagggcagccaccgccgcgtgagtgatggaagtgcccggccccagcaggagcagggccaggctggcgcagggcaccggcaccttgccctttgcatcccagacagcgatggcccgggcctcctgttcgatcttgcagtgctccaggtacaggtaactccaggaatcccgaaacttaggaagaatgtgcaggtctttgatgcgcatagtctcctcctctcggtgaggtcagggaaagcagccccagaccgtaggccttgccaggaccgagtccgcggatgacagtatcccgaagacgatcggcatcggtgacctggagaataccgtcgtaacggacggtgcgcaggcgctgccccttatcgtcccggctctttttcttatgtacatagatatagcccggctgaacttcggtattctccttatcaacaaagaatcccttctttttaccctggcacgcgagccactcgatgaggttttcattgcgcacaggtacacgagagccgatccattcctcttttacgggttcttgccgtttgggcttttgcttccggcagtctgggcaggcccgctgcgcttcgaaaaacaagcgcttaggatttcggttggcggaacaatcatatcgttcctcatggccgcaggagtatcggaggattgtgattatgtggccgcgttcactcatctgaggaagcccctgcttctgggcacgtcgccgcgcctcctcaaaaaattggtcaacttcatcctgagtgagtgatctcgctggatcatctaatccaagggaatgcctggataaccgatgtgtcggattggccaccaggcggaagcggtagtccttccctttggtgaaggaaggatcaaaggatttcttctgagggggagcagccaaaagatgccaggcgttgtgaaaggcgtagtcccagttgggctcggccgcggattgcacgagaatcaccgcccggccacctggtcgtggatcttcccaacgtttgtagggttgaaccggaaaatcgacacggaagaggaagccggaatccgcctcgcgagtgacatggacctggttgaggccgaactccgccggtttataaggtttgaggaagtgggcatcatcggatttccgggaagcggacggaaaggccatacaaaggcgctgatggacatgatagaggttgcgcagccacaaccgcccgggtctggggcgatcggggttgtcacccatgtcgatcaagagggaggacaagtacatactattccacctcctcagcggccaagtggcggcggcgggtctccagggagcggaatttgatgatttcgttccgcttgctgatgatctggtcgcgccagcgcggctcttcgggattgatgcggtccaggcccatgcccaggccgtattcgagcatggtaacggcgtcgtggcagaggcggcataaggaacgcaaatcgtccaggtcttcatgacccccggcccgtcggtaggttacatgctgcacggtggtggccggagacttgcaaaaaaggcagagcctatggtcatggtccagcctctcttgccgtttcttcttatattccgtgttgcgataatccgcccggcggcgcggtggcgccggggtgtaatgctgcgccggcgcctgggcaagctctatctcaccattggtccccactcttaattcccggcgcaggactaagcgcggctgatgcgcggggggatcgaaggaaacgggcacatcgtaccagatgagcgcctcatcgggggcttcgggttgttcagacgtcggccgccaatcgagcaggcaatccacggctggtggcggctgatctttctggagccgccagcgccagggaatcgcttttaaggcggaaagcagatcgtgaaaatcgccgaccgggtgttccagtagagggcgggacggagggcaagacttcctgcccagaaaaagcgtccatcggggtgcttttatggcggcctccaatcgagcaatcagtcccggttcgccctgcaaggccaccagaaaagaagcatcgcagagatactcgcggcgggagagcatggcgcctggtttcttccctccttcggcagtacgcatgtccatcccggcgccgaccgtgtgataatcccaccagcgcacgccgggacggtcaaggcggacacccatatgaagaacgccaagtattggaagccatttatcacgggcctcgggacgggaaactcctaaggctgcgcatagcatccctatgaccccggacttagttggggcttcagccgtccgccggacgacgaacttcgattgttgatcgccccaggcctgcagaggaccttcgaggcggagaaagagggtattggcgctcatcagaccatctccgaatttaccacgaccttctggacctcctgccaatcatggccaagctccttgattaccgcggggatcaagtctgcgagcgatttgaggttattttctgcaagagcga

SEQ ID NO: 900 - DNA, 3558 bp, Artificial Sequence
  Synthetic Oligonucleotide
gttcacccccacgtgcgtggggacgctttggcccgagggggagcagcttctgctgcgctacggttcacccccacgtgcgtggggacgctcacgggcttgtccacgcccattcgcccgcgccgggttcacccccacgtgcgtggggacgctgcgggtggtttaatgcgactcaaagcgcccgccggttcacccccacgtgcgtggggacgctactgaataaacctgaatttacggcaccctgacgagaaatagcccctcgaagtcttcgaccgaccgcgccgattttccccaactccgaatccgaaaaccctgctcattgtcgctcgaatacatcatcacacaaccgcccctcctggcattcccgcaggctttttcccagagtttatcgcgcaccatggctgaaaccctccccacaaaaactcctgtcttcggttccagaaaccaccgtgtcaattcaccccgtaacccaggcggcacacgctcaagaatcagaaccaccatcgttggcctccgtttcatcagtttccaacggataggtgcacccgccctctacttctcccgtcaaggggtcccacaaagcgcctggggcggcggcgtcctggccgaatgggtcatcacttgtcgcgcctttctttggcaacatcagcgctttttggatgtcaggaatgatcctctccagaagccttgttgacacaaacaggtcacggcacgagatgcgcacatgtcgttccagcctggcctgctcttgcgctgctgcgcgaaatgccgctgggatagaaatttccgccttgtaaagatcggcgacatcataaacgaaggacagcattttgccggtatggatgaagccgagcgcgggcgagaatcccgccgaagtaacagccgcatggcaaatgccgtaaagacacgaattggccgccgacaaggccctgttcaccgggtccgcatgggcccacttgtcacgccggtagctgcggcccgcccaaggcacgccggtttccctggcggcccgggcataggcatcccggacacggacgccttccattccgcggatctggcgcagggtcagcttcggatcgaacgtctcggcaaaccgcaactggtacaaacggtgcaccaccttcaaacgaagatccgcatccgcccaagcccgcgcctgatgcaggaagttcgccgcgctccgcgtctcgcccatgcccgccgcatagaaccggactccctcttcgccgcaccagatgaccaggcaaccatggtccgccaacacggaaatggcggcatgcgtaatcgatacgcccggccccagcatgagcagcgccagattcgcacaggggacaggcaccttgccggatgcatcgtggatggcaatggcccggacttcctggtcgacgcggcaatgctcgacgtagagatagctccagccgtccctgaacttgggcagaatctgcaggtcccggactctcatgtcgcctcgtccgagcccgcagtattggccggcgcgatcgaaagcaggccgaacccgaaggatttgccggaaccgatgccgcggataagggtctgccgaaaggcatccgggtccgtgacctggaggaggccttcgaaaagaaccgaacgcagacgctgccccttgccgtttttgttcatatagacgaaccccggctgaagggtcgtggcgtcttcctcgatatggaatcctgccgattcggcccggcgggcaagccagtcgacaagccggttggtcggaacgggaacgcgctttccgatagattcttcttttgcatccggtgaatgcttgcacagacgtctggtcggatttgccgcgaggcggaaccgaaggcaccggccttccgagaagcgtgggtcgaatggtttcacctcagggggcgctgccagcagataatccgcattgtgaaaggcatagcaccagtcgggctctatggcagactgcacgatgattaccgccctgccgccgcggagaggttcgatgaggaaaagaaatcccgagcccacggcacgcttcacatggacttggcctttaccaaactcatccggtttgaacggttggaggaagtccctatcttcggccttccgggacgcggacggaaaggccatacaaaggcgctggtggacatgatagcggttcctcagccacgaccgcccgggccgaggccggtcggggttgccgcctacgtcgatcaatagacaggaccggtacatggctattccacctcctcggcggcaagacgccgacggcgggtctccagcgagcgaaattcaacgatctcggcccgcttttgaatgatcggcttgcgccagcggggctcctcaggattgatgcggtccagccccatgccgaggccgtattcgagcatggtgacggcgtcatggcacaggcggcaaagcgaacgcaggtcctccagggtttcgtctccgccggcccttcggtaggtgatgtgctggacggtgtttgccggggctttacagaagacacagaggccgtggtcacgctgaaggcggcgcggcctcatgcctttgggaaccttgcgagacggatcggcggggtcggcaatcagggtctcgcttttccattcagcgttgttgtagttcgcgtgcggacgggggggacgcggcacacgctcttgcgtggcaccgtcggtggacacaccgttcgctccgcaggtgagttcggtgcgcgtgactaaacgcggatgatgtaccggaggatcgaacgcgacgggcgcgtcgtaccagacttcggcatcattgggggcttccggctcggtgtccgtcgcccgccattcgaggatacaggcgagcttatcaggcttcttgtcaggctcaaagttgggcaggcgcggttgccagggaacacacttgagggcatcaagcagggacctgcccgtttcgatatgcggctcgcaggtgcggtcctcgcgctttcgcgtcacgaggatcggcacgctcggcgggcaggacttgcggccgaggaaaaccggccacttcggcgacgcaatcgccgcggcaaggtcatggatcaacttcgcatcaccctggagcgccacgagaaagctcgcgtcggccaggtactcccggcgcgtgatgagcgtgccctgggcgccggtcttcacttcgttcccagcggttgtcatgccgattcccgctcctaccgtctgataatcccaccaccgtgtgccgtgccggtcgatgcgcacacccatcgcaagcccgttcaactccggcaggcgttcccgcgccttctcacgcgacaggcccatggcgcagcagagcaggcccagcaccccggacttggtcggggcatccatggtccgccggatgacgaattttgacgtgtcgccccaggcctggagggggccttcaaggcggaggaagagtgtgttggcttcggtcatttcgccgcctccgcaggcgtcccggttgcccccagcttgtccatgaccttatggacgaaccgatcgaactcaccgaactcgtcggacccgaccacggattgttcttgctcgtgttccttcatgctcttgtcgatccaggtcaggcgatggcgta

SEQ ID NO: 901 - DNA, 3556 bp, Artificial Sequence
  Synthetic Oligonucleotide
atcaggttcacccccacgggcgtggggaaaaggctaaagttgttttcagtagaatcgcatctattatacctgattcttccgtataaggtcatttttcgttgggctgtcgcggcaggatgataccgtcgagatcgacaaactggcgcctggtgttaccgaaggaacggatggtgtagccctgttcgttggcgtcggagtagatgaagatgacaccgccgttgcggatttttttacagcagcgttcccaaagtttttcgcgaacgagggcggagatttcagcgatgaatacgccagggtggggttcgatggcccagcgggagacttcgccccgcagggcgggcggggcggagacgaggatgataaccgtcatggcgtggtttcttccggggaggtgggatcttcggactgaccagtgttgggagggttctgctgttccatgagttcagggtcatagttctgggcggcggggcattcgccctcgtcgggatcccacagggccaggggagcgtcggcgatgtcggcggcggggtctcctttccgggtcatgccgagggcagcccggatatcgggaatgacccggcttagcagcctggtctggtagaaccactgcctgcaggtcatgcggaccacccgttcgagttcggacgggttttgcgcgccgagctggaaggcaatagggatggagtactcggttttgtacaggtcggcgatgtcgtaaacgaaggacagcatgttaccctgatgaataaagccaagggcaggcgaaaatccacccgcgagaatagcggcgtggcagagcccatacaggcacgcattggcgacagagagcgagcgatttactggatccgcatcattccagttgtcgaccttatagttacgccccgtccagttcacgccggtctgctgtgcccaggactcgtacacccgacggacgcggcgtccttccatggcgcgcaactgggccatggagatgcccggcggcacaggatcggggaaacgcacgccgtacaggcgcacggctacctcgaaacgggtctgtggattggcccacagggtcgcctggtgatacaggttccgcgcgtgacgggccttggagtgtccgaaggcgtagcagcgcacggcatcctctcccgtccacgcaaccaggacgccatgttcaatcagaaggctcatggcggcatgggttacgctgactcccggcccgaacaggagcaggttgatgccggcgcagggcacggcggttttcccactggcgtcgatcaggacgatggcgtgctcgtcccgttcgacgatgacgtgttccaggtaagcgtatgaccaggaatcggtgaagcggggcagggcccgcaggtcatcggaaggcgccattcgtacctgttcctttcccgatacgttacgtaccgtccacgtacgggccggacggccagttaccccaaggcatgcttcctgctcgaggcactaaccggatgagccggcgggggcgggacggatcccgcccccaccggggagaggtttcacggtttcgcgatggtgagtagtccacaaccgaaggcccgggctggcccgattcccgaggcgatggtggcgtaaaatgcccgcggatccgttacttccagcaggccttcatagcgcgcgcagaacaactggggaatacaggccctgcctggctgttccgatccgttggcattcgcgaaacccgcgcggttcacgtagtagtaatttacctggatattcagagcttccgggccgggcacgaccttgaagcctccggtctccccccgccggatcagccagtcgggcaactgttcccgtggtacaggcacgcgcgtgccattgcgggtgcgacggtcgcgtcgccaaggcccggagagatccccggggggctcgaggatcacgctgtccgggttttccctgcgttgcgccgccgtgagggtgccgacctttctcgtggcattggccatgagccggaagcggtagcgttgtccggactggaacaccgggttccaggatcgcacttcagggggggctgccagcaggtaatccgcgttatgaaaggcgtaatcccagtctggctcgatggcggactgcaccagaatgaccggattaccgccaggctggggatcgatccggaagagaaaacccgcctgccccgaccggggtatatgcaggtgttcgccgaagtcttccggccggaagggctggagaaactggggatcggtggttttgcgcgccggcgcggggaaagccatgctcagccgctgatgcacccggtacacgttacgcagccagtttcttcccgggcggatccggtccggatccttcccggcgtcgatcagcaaggtagacaggtacatgcccggatcctcctattccttgaccttttcgcccagcaggcgcgcgcgggtttcccgggatcggaaccggataatctctcttcggcgctgaatgaccaggtcgcgccagaagggatcttccggattaatccggtccatgcccatgttatggccgtactcgatcatcgtgcacgcgtcgtgacagagcctgcacagggagcgtaactcgtcgacccgttcgttaccccccgcgtggcggtaggtgatgtgctgtaccgtggtggccggggccttgcagaagacgcacaggccatggtcctgctcgaggcgccttgcccggatattccggtattcggcgttggtgtagtccgcccggggcctggggggtgatttaggaagttcatcttcggttttgttggtcagtcttacctgtccctcccctgttccacattccagaaacccgcgcgcgacgacccgcgacgtataggcgggcgcggggggaatgaagtgcacgggcacgtcgtgggcggtatccaggtcacaaggctcaaacgccacgttacccaggggccagtccatgtacacggtaagtacatccggttttttctcgaaagcgtaacgctgttcccacggcacggagagcagggcctcgatcgggttggccgtggctcgcaacgatccctggtccttcaggaagaggggtaccgaggggacgcaggactttcggccaaggtacaggggccatgtgggctcgagcagggcgtcatgtaactgccggatgagcgagggctctccccacagggccaccaggaacgaagcatcgccaaggtactcgcgaagggtcagcatcgtttcgccatgacggagcccgccttccgcggatcgccgggagatgccgcccgcgccgaccgtgtgatagtcgagccagcgggtgccggggcgatccacccggacggccatcttgagactggccataggtttcatgacttccggggtggcctcggaccggggaatgccccgggcggcgcacagcaggccaatcacgccagacttggtgggcgcgggggccacgcgccgaatcgcgaagcgggactccgcgagcccccacgcctggaaaggtccctcgaggcggatcagcagggtgttgtgctcggccatggctcaggcctcccccaccggcgaatggttcacaaccgccgcccgcgcctgggtccaggtcaggc

SEQ ID NO: 902 - DNA, 3537 bp, Artificial Sequence
  Synthetic Oligonucleotide
cctgctcttacccggttcacccccacgtgcgtggggacgctactgaataaacctgaatttacggcaccctgacgagaaatagcccctcgaagtcttcgaccgaccgcgccgattttccccaactccgaatccgaaaaccctgctcattgtcgctcgaatacatcatcacacaaccgcccctcctggcattcccgcaggctttttcccagagtttatcgcgcaccatggctgaaaccctccccacaaaaactcctgtcttcggttccagaaaccaccgtgtcaattcaccccgtaacccaggcggcacacgctcaagaatcagaaccaccatcgttggcctccgtttcatcagtttccaacggataggtgcacccgccctctacttctcccgtcaaggggtcccacaaagcgcctggggcggcggcgtcctggccgaatgggtcatcacttgtcgcgcctttctttggcaacatcagcgctttttggatgtcaggaatgatcctctccagaagccttgttgacacaaacaggtcacggcacgagatgcgcacatgtcgttccagcctggcctgctcttgcgctgctgcgcgaaatgccgctgggatagaaatttccgccttgtaaagatcggcgacatcataaacgaaggacagcattttgccggtatggatgaagccgagcgcgggcgagaatcccgccgaagtaacagccgcatggcaaatgccgtaaagacacgaattggccgccgacaaggccctgttcaccgggtccgcatgggcccacttgtcacgccggtagctgcggcccgcccaaggcacgccggtttccctggcggcccgggcataggcatcccggacacggacgccttccattccgcggatctggcgcagggtcagcttcggatcgaacgtctcggcaaaccgcaactggtacaaacggtgcaccaccttcaaacgaagatccgcatccgcccaagcccgcgcctgatgcaggaagttcgccgcgctccgcgtctcgcccatgcccgccgcatagaaccggactccctcttcgccgcaccagatgaccaggcaaccatggtccgccaacacggaaatggcggcatgcgtaatcgatacgcccggccccagcatgagcagcgccagattcgcacaggggacaggcaccttgccggatgcatcgtggatggcaatggcccggacttcctggtcgacgcggcaatgctcgacgtagagatagctccagccgtccctgaacttgggcagaatctgcaggtcccggactctcatgtcgcctcgtccgagcccgcagtattggccggcgcgatcgaaagcaggccgaacccgaaggatttgccggaaccgatgccgcggataagggtctgccgaaaggcatccgggtccgtgacctggaggaggccttcgaaaagaaccgaacgcagacgctgccccttgccgtttttgttcatatagacgaaccccggctgaagggtcgtggcgtcttcctcgatatggaatcctgccgattcggcccggcgggcaagccagtcgacaagccggttggtcggaacgggaacgcgctttccgatagattcttcttttgcatccggtgaatgcttgcacagacgtctggtcggatttgccgcgaggcggaaccgaaggcaccggccttccgagaagcgtgggtcgaatggtttcacctcagggggcgctgccagcagataatccgcattgtgaaaggcatagcaccagtcgggctctatggcagactgcacgatgattaccgccctgccgccgcggagaggttcgatgaggaaaagaaatcccgagcccacggcacgcttcacatggacttggcctttaccaaactcatccggtttgaacggttggaggaagtccctatcttcggccttccgggacgcggacggaaaggccatacaaaggcgctggtggacatgatagcggttcctcagccacgaccgcccgggccgaggccggtcggggttgccgcctacgtcgatcaatagacaggaccggtacatggctattccacctcctcggcggcaagacgccgacggcgggtctccagcgagcgaaattcaacgatctcggcccgcttttgaatgatcggcttgcgccagcggggctcctcaggattgatgcggtccagccccatgccgaggccgtattcgagcatggtgacggcgtcatggcacaggcggcaaagcgaacgcaggtcctccagggtttcgtctccgccggcccttcggtaggtgatgtgctggacggtgtttgccggggctttacagaagacacagaggccgtggtcacgctgaaggcggcgcggcctcatgcctttgggaaccttgcgagacggatcggcggggtcggcaatcagggtctcgcttttccattcagcgttgttgtagttcgcgtgcggacgggggggacgcggcacacgctcttgcgtggcaccgtcggtggacacaccgttcgctccgctggtgagttcggtgcgcgtgactaaacgcggatgatgtaccggaggatcgaacgcgacgggcgcgtcgtaccagacttcggcatcattgggggcttccggctcggtgtccgtcgcccgccattcgaggatacaggcgagcttatcaggcttcttgtcaggctcaaagttgggcaggcgcggttgccagggaacacacttgagggcatcaagcagggacctgcccgtttcgatatgcggctcgcaggtgccgtcctcgcgctttcgcgtcacgaggatcggcacgctcggcgggcaggacttgcggccgaggaaaaccggccacttcggcgacgcaatcgccgcggcaaggtcatggatcaacttcgcatcaccctggagcgccacgagaaagctcgcgtcggccaggtactcccggcgcgtgatgagcgtgccctgggcgccggtcttcacttcgttcccagcggttgtcatgccgattcccgctcctaccgtctgataatcccaccaccgtgtgccgtgccggtcgatgcgcacacccatcgcaagcccgttcaactccggcaggcgttcccgcgccttctcacgcgacaggcccatggcgcagcagagcaggcccagcaccccggacttggtcggggcatccatggtccgccggatgacgaacttcgacgtgtcgccccaggcctggagggggccttccaggcggaggaagattgtgttggcgtcggtcatttcgccgcctccgcaggcgccccggttgccccgagcttgtccatgaccttatggatgaactgatcgaactcgccgaactcgtcggaaccgaccacggattgttcttgctcgtgttccttctggcttttgtcgatccaggtcaggcgatggcgcagattcggcgagaaccagaaacgatcggcctcgatgccgtaaggcagtgtaaataaataaaggtatcaatgtgcctatcgcgattggggtcggatggtgtaattccagtctccgtggaacttgtcgcgctgcagattcacgcactgcatt

SEQ ID NO: 903 - DNA, 3503 bp, Artificial Sequence
  Synthetic Oligonucleotide
cgccccccagcggttcacccccacgggcgtggggacaacccttctcaaagccgcgctctacggcactcgaatcagagaaaggccctcgaagtcttccacctgccgggcgggatctccgtgcatgcggatggcaaacccctgctcccggttggaactgtggatcatcgtacagccgccgccccgagcctcttggcaaaccttctcccagaggaggtcccgcaccatccccgagacgctgcccacaaagaccccggccttgggttctagcatccacctggtcaattccccacgcacacccacgggcacccgctcaagaatcaggaccaccatcttcttccacctcctccggcgccgggtttccgaaattctgcccgccggctactcttccatcctcagagtcccagaggtccccaggcagggcagcatcccggtcataatccgcccccaaagcgattccagccttgtttttgaggtccaggataaattccagatcgaggataatctgcttcaagagattctgttcattaaaggcatcccggcaggcctggcgcacccgggtttccagtttatccaaaccccgggccgtctctctaaaagcgatgggaatggaaaccctggtcttgtacaggtcggcgatgtcgtagacaaaggaaagcatcttgccagtgtggataaaccccagggccggagataaacccactgcttggataccggcttggcagatgccgtagagacagctattggccgcggataaggcccggttcaccgggtcggctgcatcccaagcgtcccgccggtaggcccggccctgccaggggacgccgctctcccgggaagccagggcataggcctgccgcacccggaccccctcattgccccggatttgctgtaaagtgagattttctggcaggggctcagggaagcgcatgcggtacatccgcaggactaccagcagacgcagttccggatcggcccaaaggcgcgcctgctgcagcaggttgtcggcgctccgggtgagaccctggccgtgagagtaaaagcgcacggccccttcccccacccagcataccaggcagccgttatcagccagggcagccaccgccgcgtgagtgatggaagtgcccggccccagcaggagcagggccaggctggcgcagggcaccggcaccttgccctttgcatcccagacagcgatggcccgggcctcctgttcgatcttgcagtgctccaggtacaggtaactccaggaatcccgaaacttaggaagaatgtgcaggtctttgatgcgcatagtctcctcctctcggtgaggtcagggaaagcagccccagaccgtaggccttgccaggaccgagtccgcggatgacagtatcccgaagacgatcggcatcggtgacctggagaataccgtcgtaacggacggtgcgcaggcgctgccccttatcgtcccggctctttttcttatgtacatagatatagcccggctgaacttcggtattctccttatcaacaaagaatcccttctttttaccctggcacgcgagccactcgatgaggttttcattgcgcacaggtacacgagagccgatccattcctcttttacgggttcttgccgtttgggcttttgcttccggcagtctgggcaggcccgctgcgcttcgaaaaacaagcgcttaggatttcggttggcggaacaatcatatcgttcctcatggccgcaggagtatcggaggattgtgattatgtggccgcgttcactcatctgaggaagcccctgcttctgggcacgtcgccgcgcctcctcaaaaaattggtcaacttcatcctgagtgagtgatctcgctggatcatctaatccaagggaatgcctggataaccgatgtgtcggattggccaccaggcggaagcggtagtccttccctttggtgaaggaaggatcaaaggatttcttctgagggggagcagccaaaagatgccaggcgttgtgaaaggcgtagtcccagttgggctcggccgcggattgcacgagaatcaccgcccggccacctggtcgtggatcttcccaacgtttgtagggttgaaccggaaaatcgacacggaagaggaagccggaatccgcctcgcgagtgacatggacctggttgaggccgaactccgccggtttataaggtttgaggaagtgggcatcatcggatttccgggaagcggacggaaaggccatacaaaggcgctgatggacatgatagaggttgcgcagccacaaccgcccgggtctggggcgatcggggttgtcacccatgtcgatcaagagggaggacaagtacatactattccacctcctcagcggccaagtggcggcggcgggtctccagggagcggaatttgatgatttcgttccgcttgctgatgatctggtcgcgccagcgcggctcttcgggattgatgcggtccaggcccatgcccaggccgtattcgagcatggtaacggcgtcgtggcagaggcggcataaggaacgcaaatcgtccaggtcttcatgacccccggcccgtcggtaggttacatgctgcacggtggtggccggagacttgcaaaaaaggcagagcctatggtcatggtccagcctctcttgccgtttcttcttatattccgtgttgcgataatccgcccggcggcgcggtggcgccggggtgtaatgctgcgccggcgcctgggcaagctctatctcaccattggtccccactcttaattcccggcgcaggactaagcgcggctgatgcgcggggggatcgaaggaaacgggcacatcgtaccagatgagcgcctcatcgggggcttcgggttgttcagacgtcggccgccaatcgagcaggcaatccacggctggtggcggctgatctttctggagccgccagcgccagggaatcgcttttaaggcggaaagcagatcgtgaaaatcgccgaccgggtgttccagtagagggcgggacggagggcaagacttcctgcccagaaaaagcgtccatcggggtgcttttatggcggcctccaatcgagcaatcagtcccggttcgccctgcaaggccaccagaaaagaagcatcgcagagatactcgcggcgggagagcatggcgcctggtttcttccctccttcggcagtacgcatgtccatcccggcgccgaccgtgtgataatcccaccagcgcacgccgggacggtcaaggcggacacccatatgaagaacgccaagtattggaagccatttatcacgggcctcgggacgggaaactcctaaggctgcgcatagcatccctatgaccccggacttagttggggcttcagccgtccgccggacgacgaacttcgattgttgatcgccccaggcctgcagaggaccttcgaggcggagaaagagggtattggcgctcatcagaccatctccgaatttaccacgaccttctggacctcctgccaatcatggccaagctccttgattaccgcggg

SEQ ID NO: 904 - DNA, 3493 bp, Artificial Sequence
  Synthetic Oligonucleotide
tccaccggttcacccccacatgcgtggggaactcatgcaacacctaaagcacaggtaacggccatacggttcacccccacatgcgtggggaactcacgcccgggataggtttgccatcgtacttatacggttcacccccacatgcgtggggaactctctggaaaactgtagctaatcgaaaatggttccatatttaactaagttgtcttagtgtcaacagctttgtgtgattgcattaaagcaatcccttcataatccacaaatttacgctccctctcaccagattgacgataagaaaacccctgcgggttatgctctgtccaaacctgcattactgtacccgttccccccaatttttttatagatcggttccagagttcatccctaatcctggcgcttggattaccaaggaatatccctgttttcggttccagaagccagcgtgacaatgcgcccttcaagctcatcggcactttctccaatatcatcactaacacctaacacctccgcaatatccggtattattctttccataatcttgtgttcataaaaagcggtacggcattccatgcgaatggcccgttccaggtcaggcggcttttgagaaaccatcttaaaagctaacgggattgtaatctcggttttgtataaatcggccatatcgtaaacaaagcttaacatcttgccagtatggatgaatcctagtgccggtgaataaccggctgatagtataccggcgtgacagattccataaaggcaggcatttgcagtagaaagtgcgcggttgatcgggtctgccttgctccagtcagtctggtcataacggcgccctttccattcaacaccatattgagttgatgccgcagaataaatgcgccgcacgcggataccctccatgccgcggatactttcaaggctgaccacaggttgtatagattcattgaagcggaatcgatacatgcgccaggccacttccattctttttatctcatcggaagccagtcttgcctgccgtatcagccgccgcgcactgtaagtgccacctatgcttgcggaatagagccgtataccgtcctgtccagtccaggctaaaaggcaattatttgcggataatgattttactgcggcatgggtgatggtggtacctgggccaagcatgaccacactcaattgatcaattggaactcttgtcactgattcgccctgatgaaaattcaatccatcagagtcaacgtctattcgtcccatctccagataaagataactccagcggtcctggaagcgcggcaattcatatagcgtacggatggtcagtcactccccatagcgatagttaacaatccgaggccgaaagctttaccggcaccgacgcctcgcattacggaatcacgaatagattcaggagcaattacctggagtttgccttcaaagcgggcatagaataagcgcttaagccgcccatctttctccccatccgctttaatatcggcaccgttacgatcacccttatctttgaaagcctccacatatcccgtatgcacgttggtgagtttctccacctcgaagccacatcgcattgcgcgggaggtaagccatgcctcaagctcattcgcaggcacaggcaccctcctgccgaagttgtttttcccctcagggcgattttccttatctttctttcgcgtggcgttagccatcaggcggaagttgagaatctgtccatcccgaaattgcggatcatatggcttcatctgtgggggtgcagccagaaggtacgtggcattgtgaaaagcatattcccaatctggtttcaacgcagattgaacgatgattacgggattgccgtttgtcctggggtcgagccgaaaaagaaacgcctggtcagccgtacgctgtccatgaacatgctgaaaatcatcgggacgaaaacactttacgaagtcagggtcattttctttgcgttcagaagacgggaatgccatgcacaaccgctgatgaacacggtacatattgcgcagccacagcctgccgggccgcggtaggtccgggttatctcccacgttaataagcaggtaggataaatacatatctattcaacctcctccggactgagcctccggcgacgggtctccaatgagcgaaacttgataatcttctggcgattagtgcttatcagatcccgccactgtgaatcttcagggttaatacgatcaagtcccatacccaaaccgtactccaccatagtcacagcatcgtggcaaagccgacatagcgagcggaggtcatcctgcgtctcttctccaccggcacggcggtacgtaatatgctgtacagtattagcgggcgctttgcaaaaaacacaaagaccgaagtctgcttccaatcgctccgcgcgagccctccgatattgagtgtttgtatagtccgctcgcgggcggagtggtctgggtgtttcgttctgcgctggcttttctgcaatactgacatcagtcccgatttgtagttcgcggcggataacaaggcgaggggcacaagaaggtggttcaaaagttagagggctgtcataccagaccagagtgtcaatgggcacttccgcctgtcctgctgtcggctgccattcaagaagacaaccaaccgtctgaggtgcaggatcagtctgaagtctccgccgccacggtacagactttagtgctgtgagcaggtcagggaaataacctgccgtgtgttcaagcaatgggcgcgaggggggacagcatttacgccccaggcatatcgtccatcttgggttctctatggctgcctctaatgtggcgatgagatttggctctccctgtagcgccacaagaaaagaagcatcacataggtactcccgccttgtgagcatggccacggatgtccccgcctcctttacagctttccttttaccggctgtacgcatctccatgcctgcacctacggtgtgatagtcccaccaacggacaccgggttgatcaacccgaacgcccatccttatagtatttaatttgggcagccactccgaggatgcttgggctcttgagacaccgagcgctgcgcagagcattccgcttactccagattttgtaggcgcttccgccgtacgacggacaacgaacttggattcatggtcgccccatgcttgaagagggccatcaagcctcagaaacagggtattggcattcatggattcaccgatgaatttatgaccgctttcttaaccttttcccagtcaaaaccaattgctttgatcacatcctgtataagcacatccattgatttggtggggctgtcaccaagggatacttcctgcttattctcaattactgttaaggggtatcgtagattaggagagaaccaaaagcgttgttgcggcttgccaaaaccggtgtccaggtcgtgcacatattggcccaactgcgcaatactctgcgagattatgtcccgttcgccctgagcaaccggtttcgcaaaggcgttg

SEQ ID NO: 905 - DNA, 3469 bp, Artificial Sequence
  Synthetic Oligonucleotide
aggatcgatgcgaaaaagaaagccggcttcgtcgttgcgcggggagtggacttgtttcagggcatcgtactcaacttcgttcttcttccggtcagccaagtgtcgttgctcgggaaaatcgtcctgatcgtaaggtataaggaattcaggatcgcgctttttccgtggatcggatggaaaggccatgcaaaggcgctgatggacatgataacggttcctgagccacaaccgtccaggccgatgccgatcgggatcgtcccctacgttgatcaagagacaggagaggtacatagctattccacctcttcggagacgaggcgtcggcgtcgggtttccagcgagcggtatttgagaatctcggctcgcttttgaatgattcggtcgcgccagcgtggttcctcaggattgatgcggtcaagttccatgccgaggccatattcaagcatggtgacggcatcatggcacagaccgcaaagcgaacgcaggtcctccagggtctcgttgccaccggctcttcggtaggtgacgtgctggacggtcatgcgcgggccgggcgacttgcagaagacgcacaacccggtgtcggctttaattcgttcttcgcgacgcttccgatattctgtattcttgtagtccgcgcgcggacgcggcggtgctggcgtggaagtctggatcggatcccccacttcaactgggactgtgccacgcaggacaaatcgcgcctcgtggaccggtggatcgaagcaaaccggcacgtcataccacacttccgcgtcgtcgggggcgacatcacaatccggggcggaccgccactccacaagcgtttccaccgccctgttcttcggcgcaacgtcagtcttgtaccgcgggtgccacggcatggcgcccagcgcggcgttcaggccgtcataaccggcgggattcgtccacaactcaccctcactgggccttgcaagcaccgggacggacggcgggcaggacttgcggccaaggaaaaccggccactttggcgacgcaatcgccgcggcaatatcatggatcaacttcgcatcaccctggagcgccacgagaaagctcgcgtcggccaggtactcccggcgcgtgataagggtttcaatctcgccggtggaaggcgtccgcttaattcccttcccgtcagctgttataatgccgattcccgctcctaccgtgtggtaatcccaccaccgcgtgccgggtcggtcgatgcgcacacccatcgcaagcctgttcagctccgacaggcgttcccgcgccgcctggcgcggcaggcccatggcgcagcagagcaggcctagcacgccggactttgtcggcgcatccattgtccgccggataacgaactttgacgtgtcgccccaggcctggagtgggccttcaaggcggaggaagagtgtgttggcctcggtcatttcgccgcctctgcaggcgtcccggttgtctccatcttgtccatgaccttatcgacgaactgatcgaactcaccgaactcgtcggaaccgaccacggattgttcttgctcgtgttccttcttgctcttgtcgatccaggtaagacgatggcgcagattcggcgagaaccagaaacgctcagcctcgatgctgtaacctacaacgagatcgtgggtatacttgccgagccgggcgatactttcgccgaccaatcctcgttcggacttttccggcaccggatcggcgaaggcgttggcgtagctgacgggcgtggccgacttggttttgacttcgaccagaactccgtctggcggattgaatgccgcgaaggcgtgctgtttgccggaggggttggccttggcggctgcttcaaggaagcacttcacggtggtccttgcaagtgcggtatcgttgttcagattcgcgtgcaactggctccagtcaatcacgaaatgtttgtaaaaacacgccgaattgaacatggcctcgttgacgtgggccgcgccggcgtcctggcctggcacatcgtcggcagcggtgaagtagtctacctcgttcacgattgcgtgagtcgagatggcgtgagcggcggagagcgcagcctcaacggtaaactggcctttgaggtcctgaaacggcccctttgcatcgaactccgtcatgcggccacaaagtgcgatgtcgggggtcttgacgaactcgccgatgatctcggcgaatttcctgcccaggtcgctgttttcgtcgcgcacagcctcgcccattttgttgatggcggattgaggcagaaagaagagtatttcaaaagtgttctcatccctcaggccgacccctccgtctgtaaagaccttccgaatggcttttaaatgttgctcattcggttgattaccctcgcccgccgccgcctttgcgatcaactcaatcagccgccgtgtacgaacgccgccatccttttctaaagcggctgcgaattccggactacgccggatgcttcgcttgagacactggctggagatgcgtgcccgggtaacaccgccgaagatgcaggtctttggcgcacccaagtcgtcccggttcaaattcgccggactgtggttctggatcatgtggatttcaatgatcattttaatatcctcctttcttttttgacagcgttgagatatgtttcggcccaaatgtcgcgaacatcgcgtccacggcagtgcacctcgccccgttcccagatggagagatcgtcgaggagttgttcccagtcgatgcccttcacatcccgcacgtgcggcacgtgtccggcgacgacctgggcgacctctcccagcgcccaacgtaggtttggctcaagggctgacaggggcgagcagagcaaggcatcaaaacgctttcggaaacgattgcgggacttgaactccggtgggtcgcagggttcgcagcggcccaaaattttgggcaaagacggccccgcacctgaatcgggcctgatgtgcgggacgcggaacgcgccgaaaagcttggcaacgagccatgacggctcccggcgcggagtcgccgggcttttcgcccgcagcggccaccagaggcccgtgaagaggtcgaaaccctggagcgttgcgtcgagcggccgtccggccagacggcgcagccgcgaacgctcaccttcctgcaagtctgaaagcctcttgatgtattcagcggtctggctcattttgtgcctctcttcttgcggccacgtttcggtttgctaggcatggccgcctccgatagcgcgtcaccatgttctgtcttattgagtgtcgactccagggccgatcttgcccgcgccaaggcctcccgccgttgcagcagcgagccagtaatagtggaacggacgacttgctcaatgacccggatgagaatctctttaaccgattgtcgccactccttaacgtcgtattgtaacaatagttccctgaagcaattctccatatcgacatgcgtttggctactgagcgcacacagactcg

SEQ ID NO: 906 - DNA, 3447 bp, Artificial Sequence
  Synthetic Oligonucleotide
gcccgtacccgccgcatagaagcgcaccccctgttccccgcaccagacaaccatacagcccgtgtccgccagcgttgtaatggccgcatgcgtgatcttcgtgccgggacccagcatcaacaacgtcaaattcgcgcacggtaccggcgtcaccccgtactgatcatgcaccgcaatcgctttttcttcctgatccacccggcagtgctcgacgtacaggtaactccacttatcgcgcaccttcgggatttcgtgatagtcctttgttctcatggcttcccccttttcccaagttcgtggcacgggcgtcccgcccgtgtcttcaacaccgtaggcaacatcctcacgccgctctcacacgattcaactgtcaaagaacccgcgctgcaacgccgcgccaatcagcgcggcgcaaccgaaagcaaaccaaaaccaaacgccttcgccgaaccgatgccggcggcaatagcatcggcaagcgctttctcgtcctttaccgcgaaaatgccttcgagaagcgcggaccggaacttcatccgctcgcctttgccgggccgaaacgcgtttacccaaccgatttgaatcacttcgcatttccgcagttcgaagccgttccgtggcccctttctcgcaaaccagggaacgatgacctcgtcaggccgctggtccttctcccacgtcagcgcaatacgcttgccctgtgttcgcgggcgtccttctgtgtccgtcttctcccctgtcttgcgatacttcacgcttttcttgctcaagttgacgcgaatgcggaagcagaactcctgccccgtcgcaaacgttggactatattcgcgcgtttccgcttcggcggcaaggaacgtgcgcgcattctgaaaggcatagcgccaattcggttccgaccccgacaggaccacgattactgcgcggggacaattgcgctcgacgctattgtccacacgaaagaggaagcgcggggccgcgaagcccttcggattgaagggggcaaggaactccggatcggccgtgcgttgcgcctcggtgggaaacgccatccaaagccgctggtgcacatggtaaacatttcgcagccacagccgccccggccgcggccggtccggattgtcgccaacattgatcaagaggtgcgacaggtacattattcgacctcctctgccgccagtctccttcgccgcgtctccagggaccgaaagcgtatgatctcgtcccgcttacgaataatcgtgtctcgccatcgctgttcctcgggattgattctgtccagtcccatcccgaggccatattcgatcattgtcacggcgtcatggcacaggcgacagagtgaacgaagttcctcaatttgttcgtcgccgccagcgtgccgataagtgacatgctgtacagtcgtcgcggaagacttgcagaagacacagagatgcttgtcacgatctaatcgctcttggcgaacccgccggtactgtgtattcccgtaattggcgcgtggccgcggcgggcgcggagtcctgcgttgggttggctctccggtctccacttgaccgtccctgcccaactgcaattgccttcgagaaacaaaccttggtcgatggcttggcggttcaaacgaaatcggtacgtcataccagacttccgtctccggcggtgcttcgctttcctgggcagtcggcacccaatcgaacagacaatccacggattcagggacttcgtcaccttcatatcgcggccgccacggaaggaacgctagggccgacaagagatcggagcacgtcactgactccgcctctgccactggtcgcgagacggggcagcattttctccccaagtacagcggccataccggattccgcaaggcgccggccaactcctcgatcaccggcggatcgccctgaaggacaacaaggaaactggcgtcacacaagtattcgcgcctggtcagcatggtgtccgccttcatcccgccctccgccgttctcatgcgcattccggcgccgacggtgtggtaatcccaccagtgtatgcccggcctgtcgcaacgcacggccatttgcagtgccaccagtcgcggcagccgctcgcgtgacgcttcgactctaggcacacccatcgcggcgcataataggccgagcaccccggacttcgttggtgcgtccgtcgtgcggcgaataacaaacttcgactcctgattgccccatgcctgcatagggccttcgagccgtagaaagagcgtgtttccactcatggggccacctcggaacagactacggcttgctgcacttgttgccagtccaacttcgggtcaatacccttaatcaccgcctcgatcaaggcatccaaagacttgtagctgtttggagtaagggaacgctccgtgtccttctcaacattcagggaatacctctcattaggcgagaaccagaaacgttcccgaggcggaccataacccgcttccaggtcgtaggcatactggctcaattgcgcaatgctctgcgagatcatgtcccgccccccgtcgagagacaccggtttcgcaaacgcattcgcgtaactgattggcgtgtccttgaactcgataagcatgccatccggtggattgtgcgcggcaaaactgttctgctttcccgtcgggttggtcagcgcagcaccccgaatgaatgccccgaccgtatgtgcggccaactccaagtagccttgaagattctcgaccagcatctcccagtggatagagaagtacttgtagaagcaagccgaggcaaacatggcctcgtccacatagccggctcccgcgtcgtcccctgggatatcgtcggcggcaacgtagtaatccacttccggccgcgcctcgtgggtggaaatggcatgcgctacctgcaaagcggcttcaacggtggtatctttaagcacgcctgtctccagcatccgcccactgagcgccatatctggaaccgcggtccgcgtggcaattagtttgccgaattcctcggccaacttgtcatcgctcttgccagtgctggcttgaagtagccgggccatttcttcaatcgcgtcgcgacttgtatagaccagcatcttgctccgttctgaaccactctgctcagattcctccttcttcgatttcttcggcttgagaccgcaaatctccagaatcttctcggcgcgcttctgaacctctggcccgccttctatccgatcagtgatcaactttgccagttggcgcgttctcactccaccacaaagcaccctaaactgctcactcatgcgaatacttcgtttaatacactgactggaaattcgagagcgaagtactccgccaaagtagcacgtcttcggcgcgcccaagtcgtcccgattgagattcgcgggactgtggttctgaatcacatgcatgtcaatcaacatctttcaaccctccgttgttagcaataaactgttccgccc

SEQ ID NO: 907 - DNA, 3446 bp, Artificial Sequence
  Synthetic Oligonucleotide
aactcggccagtacgttcacgatatcgacaccggatacggcaaaccaacgaggcggttctggttctcgcccaatcttcgctatcccttgaccgttacggagggggataaggaaaacgccttggccgaaaacaatatcaagtcgctcgaggaattgatcgaggcagtcatcaagggaatcggccatgattgggaggaggttcagaaagtggttgtgaactcggaggtggcctgatgagcgcaaataccctctttctccgcctcgaagccccccttcaggcatggggcgatcagcagtcgaagtttgtgattcggcggacggctgacgccccaaccaggtctggcgtcatggggatgctttgcgcggcgttgggcgtctcccgctcggcggcgccggaaggctggcttccaaggcttagccgcctgcgcatgggcgtccgcatcgatgtgccgggggtccgctggtgggattatcacacggtgggcgccgggatgccgatgcgcactgccgaaggtggaaccaagccaggggccgtgctgacccgccgcgaatacctttgcgacgcctcgtttctcgtcgcttttcagggagagtcggacctcattgccgaactggagtccgcaattaaagcgcccaaatggacgctctatctgggcagaaagtgctgccctccctcgcgccctttactggagcatccggggggtgaatttcctgacttgctttctgccctcaaatcggttccctggcgcaagaggttggagggagacgatcagcccgaagcgctggattgcctgcttgattggaagtcaaccgaagagcagccggaggctcccgatgatgcgctcgtctggtacgacgtgcccgtgaccttcgacccgccctcccaccagccccgatttgtcattcgcaagcaactgcgcgttggactcgacggcgaagtaacgcttgcaactcagccagcacagagctacacgccagcgcctccccgcccaagagcggattacactaataccgagtacagaatccgacgggaaaagcggctcgacgacgactatcacttgtgcgtcttttgcaagtcgcccgccaccaccgtccagcacatcacctatcgccgcgcgggtggcaatgaactcgcggatgacttgcgctctctctgtcgcctctgccacgatgccgtcaccatgatcgaatatggcctaggcatgggcatggaccgcatcaacccggaagagccgcgttggcgcgacttgattatccaaaagcggaacgaaatcatcacgttccgctccctggagactcgccgcaggcgcctggtcgccgaggaggtggagtagccatgtaccggtcctgccttttgattgacgtcgggagtaaccccgaccggcctcggcccggaaggctgtggcttcggaatctctatcacgtccaccagcgcctttggatggcgtttccctccgagaaccgaaaatcccatgatcgcgattttcttaagcctttcaaacccgcggactttggcgagaagccggttcaggtagaacgcggggcgggttccggctttctttttcgcattgagccgcagcccgccgggcgggtcgtgattctcgtccagtccaactccgccgtgaagccggattgggactacgccttccacaacgcccgttttcttttgaatcctctggctgctcccccgcaggtagaggaattcgaccctcgcttcgccaagggccaacagcttcggttccgcatccgcatcaatctaagcaagaagttaaaaacgagcgcaaagggcgtcgatcttaccaaggcgggcgagggaacagatcgccaaggccgcccgaaggcccaaagcaaacgcgtagcgctgacctgggataaggaccagaaccccgacgatgtgatacgaaaatggttcgccgccaagggcgaccaaggtggcttccaggtggaaactttccgcgtcttgcaaatcgggtggggcgcaggaaaccgatcggacccgaggccggcgggcgatcgcatgaaatttcgctcagccttattggaggggacgcttacggttaaagacgcggatagcttcagagaaaccatcgtgggcggcatcgggcacggcaaagccttcggcttcgggcttctttccgtagcccctcgcacaccactcccggcagaggcaacgtgagagttctgacgccaaagcgagccccgaagcagcgcgccgagatcgcccgccgcatgtttgtgcagcgctttcccggcgtggatgtgcgggcgtattccgtcaccgaattgcggggcatggagggcttgcgcgtgcgcgcaaaatacgcggaactcggcgagcagtacggagtcacctggaaagggcgcaactacgacaaatccaactggaatctggcggacaacatcaatcgcgccctctcgaccgcgaatgccagcctctacgcgttgtgcgccgccgtactctgctcgctgggttacctgccgtctctgggattcgttcacgacgccggcacgctgcccttcatctatgatgtggcggacctgtacaaggaaataaccagtttcccggcagcctttcagtccatgcgccaggaccccaatgacaaaggcgacctggtccgcacgctgctgaaggaacgcgtcgagcaggagaaactgctccagagaattcccaaagacatggaggaactgtttgcatgacggtcatcgtcgccaccgacacgccggatgccattcgcggaatgctgaaacgctggtttatcgagccccgcccaaacgtcttcgtcggctcactgaaccggcgcactcatgagaaaacgatcgagtacatcaagcgcaacgcggccgatatcggcctgctgatcgtcaacagctatcctaattgccagggcttcaaaattgaaaccaccggccccaccgaccgcaagggcgttgaagtcagcggtttgtggatggtggccgagaaatgggaggacgaaacgacgactgctccagctcaaaccgccgatttttcctctgaatcctcaagctaagtcctttggaattcagggtaatccccacgcgcgtggggatggtccgccttccgtgccagggctacggcttcctcgtaagtaatccccacgcgcgtggggatggtccaagcgactgctccgcaagcggctttgcgatcaagtaatccccacgcgcgtggggatggtccgttcctcgactgcaaccgccaggtcctcggcttgtaatccccacgcgcgtggggatggtccgggttacgcgcttccggacgcggtagcgccgccgtaatccccacgcgcgtggggatggtccgttgacgccggaacaagcctcgaatcacctgccgtaatccccacgcgcgtggggatggtccggcgcgccgtagaaaaacacggtgtcagcgcctgtaatccccacgcgcgtggggatggtccggattca

SEQ ID NO: 908 - DNA, 3445 bp, Artificial Sequence
  Synthetic Oligonucleotide
attccgaagccacagccttccgggccgaggccggtcggggttactcccgacgtcaatcaaaaggcaggaccggtacatggctactccacctcctcggcgaccaggcgcctgcggcgagtctccagggagcggaacgtgatgatttcgttccgattttggataatcaagtcgcgccaacgcggctcttccgggttgatgcggtccatgcccatgcctaggccatattcgatcatggtgacggcatcgtggcagaggcgacagagagagcgcaagtcatccgcgagttcattgccacccgcgcggcgataggtgatgtgctggacggtggtggcgggcgacttgcaaaagacgcacaagtgatagtcgtcgtcgagccgcttttcccgtcggattctgtactcggtattagtgtaatccgctcttgggcggggaggcgctggcgtgtagctctgtgctggctgagttgcaagcgttacttcgccgtcgagtccaacgcgcagttgcttgcgaatgacaaatcggggctggtgggagggcgggtcgaaggtcacgggcacgtcgtaccagacgagcgcatcatcgggagcctccggctgctcttcggttgacttccaatcaagcaggcaatccagcgcttcgggctgatcgtctccctccaacctcttgcgccagggaaccgatttgagggcagaaagcaagtcaggaaattcaccccccggatgctccagtaaagggcgcgagggagggcagcactttctgcccagatagagcgtccatttgggcgctttaattgcggactccagttcggcaatgaggtccgactctccctgaaaagcgacgagaaacgaggcgtcgcaaaggtattcgcggcgggtcagcacggcccctggcttggttccaccttcggcagtgcgcatcggcatcccggcgcccaccgtgtgataatcccaccagcggacccccggcacatcgatgcggacgcccatgcgcaggcggctaagccttggaagccagccttccggcgccgccgagcgggagacgcccaacgccgcgcaaagcatccccatgacgccagacctggttggggcgtcagccgtccgccgaatcacaaacttcgactgctgatcgccccatgcctgaaggggggcttcgaggcggagaaagagggtatttgcgctcatcaggccacctccgagttcacaaccactttctgaacctcctcccaatcatggccgattcccttgatgactgcctcgatcaattcctcgagcgacttgatattgttttcggccaaggcgttttccttatccccctccgtaacggtcaagggatagcgaagattgggcgagaaccagaaccgcctcgttggtttgccgtatccggtgtcgatatcgtgaacgtactggccgagttgcgcgacgctctgggatatgatgtctcgttcgccctgggctatggctggtcgggcaaaagcgttggcatagctgagaggtgagtttctgatttcgaccagcattccgtcgggtgggttgtgcgcggcgaaactattctgtttgcccgtgggattcaccaacgccgctccccggatgaacgcgccgacagtatgagcggccagttccttgttgcccttcagattgttgatgagggtttcgaagtcaatcgaaaaatacttgtagaagcaggcggagccgaacattgcttcatctacaaagcctgctcccgcgtcttcaccgggcacatcatcagcggccacatagtagtcaatctccgggcgagccgcgtgagtagaaattgcgtgggcaacttgcagcgccgcctcaacggttgtgtcaagtcccttccagacgtcgccgcccttgggcttcgcgccgccttcctccgacgcctgctttttcgctttctttggttccagcattctgccacagagtgccatgtccggggtgctcgtatggcgagcgattatctgggcaaattccttggcgagctcgttatcggtcttggccgacttggttttcagaagctcagacatctcgttgaccgcttgtttgctcacataaaccactccggcgcttttttcgtcgggcgtagattcctcgtcgtcgcctttcttccctttcttctcttttgccgcgatgccgcagatttctaaaaccgcgatcgcctttttaaactcggcggtatccgggccgcctggagcgatcaattgcgccagtcgccgtgtgcgaacgccgccgagcaactgcttgaattcgtcactcatgcggatgctccgcttgaggcactgactggaaatacgggagcgcagtactccgccgaagtagcaggtcttgggagcgcccaagtcgtcccggttcaggttggccgggctgtgattttgaatggcatgaatttcaattaacatgacggtcctccttcgaagacttcaagaattcctcggcccacttgagccgggtggtttcgcgttcccaaatggaaagatcgtttgtcagcgtcacccagtcgagcttcgggtttttggaggcgatgaggttaagcgaccattgcaaggccggctcgagtatatcaaccggcaaggtcagcatcctgtcgaacctttccgcgacagggtctttctcggggtcattgtcgttccggtaccgcccaagctgccacgcaagcgtctgcccgggtgaatgctcgatcggccggaaggcatagagttttgcgataagccacgccaccgcacggcggggcgcgcgctgattcctctcccgcaacggccaccagagccccgcgaagaggtcaaaggcatcgaccgattggtcgagcccttgcccggcatgctcgcgcaggagtccgagatcaccggacttcagatgtgtcaggacgtcgacgtattgctccgttggagtcatttgtcgcctcccttcttccgtccggccctcccggccggtggggtgcctggctgcatgttcggccttacattgacaatctggcgtcgccgccggagcgcagcggtggtatagcccggggaaagcgatttggcgacggcggccatcatcggcctatattcccgggctgcctgctcccacgcatcgcggcctcgcgaaatcaactcgccgaccttcccggagacctttgcttctacgtgcgggcgaactgcggcgaccatgggaggaatttcaagatgtcttcgggaagtccctctcggtttggctttgccggcaagcttccggccctccttttgccacatgtcaatcgtttcgacactctccgcgacctgccgatcatctagcgtgctcgggagaggaatctcatattccatcgcttccaggtacttgtcgttctgcaccgtcgcaaagctgacgacccacaagcctcttttgccattgggctttttctcccgaagaattcccgccgctatccttgcccgttgcccagccgccgcgtcggttgcaccaagggc

SEQ ID NO: 909 - DNA, 3437 bp, Artificial Sequence
  Synthetic Oligonucleotide
tcacagagcattgcacagcttgggcaatacatacatgaccttgacatcggcttcggcaaacctcaaaaaagattctggttttcaccaaatctccgttttccacttaacgccgtcaaagaaggtaaggaatctgcactttccgaacaaaatataatgtcccttgaaggtctgattaccagcgtaatgaaagaggtcggatacgactggagcgatgttcagaaaagcattgtaaatcctgaggtaccgtcatgagtgttaacaccctctttctccgtttggaaggaccattgcaatcgtggggtacggagcagtcgaaatttgtgataagaaggacaagcgaagcccctacgaaatcaggaataattggaatgtgttgtgcagcgctcggcatttcacggcaggaggctgcaaacggttggcttcaaaaactgagtgagcttcgtatagcagtccggattgatgtgccgggggtccgatggtgggattatcatacggttggagcaggcatgatgatgcgcaccagtgaaaaccgaagcaagacaaagccaggccccctggttacccgacgcgaatatctctgtgatgcaagttttctggttatccttcagggtgagcatagtctggtcgccgaattggagattgcagtcaacaatcccaggtggccaatttacctgggcagaaaatgttgtactctatctcgtccactgctggtgcatccggcaggcgattttccgaatttggtttcagcactgaagtccataccctggcaaccaagacttgccggtgatccgatgccgcaaacagttgattgtcttatcgactgggaaccgacaatcgatcaaccagagccgccagacgatgcgctcattttctacgatgtgccgctgacattcgatcctccatcgcattgtcctcgttttgtcatcagagagtctttgatagtggggaaaaaccgggaaattggcattgcagaaaagccggcgcagaataaaacgccacgaccgtcacaaccacgggcagactacagaaatacggaataccgccatgctcgcataaaacgtcttgatgctgaccaccatctgtgcatactttgtaaatccccggccacgaccgtccagcatatcacctaccgcagggccggagggaatgaaaccccggatgacctccgttccctgtgtcggctttgtcatgatgcagtgacgatgattgaatatggcgcaggcatgggattggaccgcatcaatccggaagaaaaaaagtggcgggaacaaatcattgagaagcgaagcgaaattattcgttttcggtcaatagaaacccgacggcggcatctttccaaccaggaggtctaatgtacttatcaacgcttttgatcaacgctggcgatcatcccgaccgaccacgccctggaaggtcatggttgcggaatgtttacagggttcatcagcggctgtgcatggcatttccctccggggagcgaaaacaggctgatgaggattttctcaagccctataaaccggaggattttggatatcatcaagttcatgtaccacgaataaaggatgccggattcctgtttcgtatcgatcccattccgggaggcagggccatcattctggtgcagtctgcagtggaacccgactgggattttgcattccataatgctatgtttctgctgtctgcaccgcccgatataaagccttttgatcctcaattttcaattgggcaaaaactactgtttcggctgacagcaaagccaactaaaaaaatagacacaaaaagtgggcctgatggaaaaaagcgtaacggaagacgagttccggtaaggccagaaaactttttggaatggctggttcaaaagagcattcggtcgggattctctattatgagtgataatattatcattcagacatcctatatcttttttcacaaaccgaatacacaacaggaaaattatttgagtgaaatatcaccagggaaaggcgattatcaagctcgcctgcgattggtccgttatgatggagttctcacaattgatgacattaacctttttcatttagctattgaacgtggcatagggtcaggcaaagcctttggttttggccttctttcgttagcacaaatgcagtgtggaacgctatgaaaatcaaggacctacacattcttccgaagtttcgtgatggtttgagttatctctacgtggaacactgtcgaattgatcaagaatctttggctatcgccatccatgacgcgcgcggaaaagtacctgttccctgtgcgaccctggctctcttgatgctcggtcccggtgtttcaataactcacgccgcaatatctgttcttgctgatcatggttgccttgtggtctggtgcggggaacagggcgttcgtttctatgcagtgggcatgggagagacgcgcagttcagctaacctgttgcaccaggcgaagatgtgggcggatgataattgtcgcatacaagtgatacgtcgtctttatcagttacgatttcccgaaaaattggatacatccctgacccttcagcaaattcgcggaatggaaggattacgggttcgctcggcttattccagagcagccaaggagtccggtgtctcctggaccggtcgcagctacaaatctaacgaatggaacagtgcagaccccgttaacagagctttgtcaactgctaattcctgtctttatggcatctgccacgcggcagtggtgtcagcaggcttttcgccggcgctggggttcattcatacggggaaaatgttgtcattcgtttatgatgttgctgatctttataaaaacgagattacgatcccaattgcatttcgtgttgttgctgaatccaaagatgttctggaaaaacgtgtacgggtggcctgcagggatatgttcgtttctatccgcctgctgaaacgaatcattccggatatccagatggctttggggctttcaacgcagaaaacagcagatgataatgaaccattcgaccgggatgctaccgcaccaggttctttgtgggatccggagttaggcacggtggaaggcgggcgctcgcatcctctggaaatggatcaaatgactgaaagggaagatgatggtagttttcatccttgaaaatgtgccactgaggttaagaggagaattatctcgctggttcctcgaaccaaaggcaggtgtttttgtggggaatgtttcggcaatggtaagggagaagatttgggaaatggtttgcaaacaagtaaaggaaggcggttgcttgatgatctatcgcagtgataatgaacagggatatcaaattcttagttctggtcaaacattgagagcaattgaagacttcgaaggattattgcttattcgggtaccacagatttaatattttttcagtattgtccccacgcacgtgggggtgaaccgaaatccggttt

SEQ ID NO: 910 - DNA, 3436 bp, Artificial Sequence
  Synthetic Oligonucleotide
atgtcgcgcattgtggaaggcgtaatcccagtccggctcgacggccgactggacgataatcatcaccctgccggcatgtttcgggtcgatgcggaaaagaaagccctgctgctcgctgcgctccaaatgaatttcgtcaagcacggccttgtcaatggcagcggccagctttgctgtagggttttgttcctctggcaagggcgtatctgaaacgttgttcttattctcaagctccttgtaccgcttcccattgcgctccagccggtcggcaagatggcgctgcaagggaaagtattgcggttgatatggggctaggaactgagggtcgttatgtttgtgttccgctacgggaaaggccatgcaaagccgctggtgaacgcggtagaggttgcgcagccagaggcgccccggtcgcggacggtcgggattggttcctacgtcgatcattaaacaagagagatacatggctattcgacctcctcgggactgagccggcggcggcgggtttctagtgaacgggagcggacgatttcatcgcgcttggcgataatgcggtcgcgccattgcgggtcttggggattgatgcgatccagccccatgcccaggccgtattcgatcatcgtcacggcgtcgtggcagaggcggcaaagggaacgtaggtcgttcggttcttccttgccgccggcccggcggtaggtaacatgctggacggtggttgccggcaacttgcagaagacgcacagcccccaatcggcctgtagccgctcggcgcggcgacgcttgtactccgcattgttgtagtttgcccggggacgcggcggcggcggagtccggttctgcgccggctggtctgccacatgaacctggccgccattgccgacatcgagttgcttctgaattacaaatcgcgggcggtgcgaaggcggctcgaacgtcaagggcacgtcgtaccagacctgcgcatcgagcggcgcttccggctgctcggcggtcggcgtccagtcgatcaggcaatccaaacactttggtttgggatcgtccttgaaccgcggctgccaagggagcgacgtcaacgccgaagccacatcggaaaatgtcgccggcggatgttcccacagcggccggcagggcgggcaacatttgcggcccaggtagggcgtccagcgtggattcttcactgcctcggccagggtgtcgataagagccggctcaccttgcagagccaccaggaaaccggcgtcggcaaggtattcacggcgggtgataagcgtgccttgcggtcctgtcttcaatttgcccgcggccgtcatcaggccgatgccggcgccaacggtgtgatagtcccaccagcgcgtgccgggtcggtcaatgcggacgcccatttgcagctcggcaagccttggcaaccagatttcggcggcttcggcccgcggaatgcccatcgccgcgcagagcatgccgaatacgccggactttgtcggcgcgggcatggtgcgacgcataacaaacttcgacgtatcgccccaagcctgaaggggaccttccaggcgcaggaaaagggtgttggcgtccatcatttagactcctcattcacgacgacccgttgcacatcttgccagtcgaaaccaatggacttgataacggagacaaccagatcgtctagcgaattgtgcctctgggcgtcgatctcgacttcctctaccttgtcgccctccccaatgacttctttcttaacgtaagtaagtgagtgtcggttattgggcgagaaccaaaaacgtttttcgcgagcgggggcgccaaatcccacgtcaagatcgtgaatgtactgcccaagctgggcgatgctctgcgcgacgatgtcgcggtcgccattcgcggccggtttggcaaaggcattggcgtaactggtcgggctgttcttgatttccaccaggatgccgtcgggcggattgtgtgccgcaaagctgttctgcttgccggtgggagtcgccaaagccgcaccgcgtagaaaagcaccgacggtgtgggcggccaactctttgtggccatctccgaagcctttgaggttctgaaccagcttttcccagtgaatggaaaaatacttgtagaagcaggccgatgcatacatggcctcggctacatatccggccccggcatcctcgccaggaatgtcgtctgcggcaacatagtagtccacatccatgcgggcttcatgggtggaaatggcatgagcgacttgcaatgccgcctcgacggtggtatttaggttgttccagacatccttagcgtccttgtgtggctccaacatgcggcccgataaggccacatctggcgccacagtagaattggcaataatttccgcaactttttttgcgatattcttgttactctccttagagttcttctcactcccattagatttcttcagaatcgtggctatgctttcaatgccctcgcgcgccatatacacaagcatcttgctcctatcctccgattgctcggtggtttgatcatcatcagatttggcattcttggcttccttagacttgaaaccacaaagattaagaatctcctcgacccatttgcgcatggtgtcaccgccgtcaatcttctcggcaattagcctggccaattgcctggtgcgaatgccaccgagcagttttctgaactcctcgctcatgcggatactgcgtttgatgcactggctggagatgcgcgaacgcagcacgccgccaaaatagcaggtcttcggtgcgcccaggtcgtcgcggttcagattggccgggctgtggttctggatcatatggatttcgattaacatggcaaagctccttattgtgaaaggttggtgttgttcagatatacttccgcccagatgtcccgaatgtcacgtttcaggcgatgctcggacccgcggtcccagatggaaagatcatcggtcaacgttacccagtcgaatccggacaggcaaccggagttgacttcctcctgcacaacagatagcccccaacgcaagtgcggttcgattgccgaaagcggcgcacacaacagggcatcgaaccgccggcggtatcgcgggcgaccgtgctcgtcgcgcggctcgcggcggccaagaacggccggcaaccgagcgttttcctgatccacctgtggcaaggggaatttcgcgtagagcttggctacaagccatgccacttcgcgtcgcggggcctttggacttttttgccgcagcggccaccaaaggccggcaaacagatcgaagccgggcactgattcgtccaggccgcgcccggcaagcgtccgcagcctggcccgctcgccggggccgaatagcctgtcgttttccagtcgctcgatgaaagagacggtgctcatgaatcggtctcctggcgtgactttctggtagtgcgtttctttttgcccgtggacgccgggg

SEQ ID NO: 911 - DNA, 3435 bp, Artificial Sequence
  Synthetic Oligonucleotide
cattcggttcacccccacgcgcgtggggacgacactgccttctaaagggcttagggtcggcgaacgagcagaagtccctcgaagtcctcaatggtgcgggacggcagaccccaaaaccggaccgaaaacccttgctcgttggcagcattgtggaccagaattcccgcgccgccgctcaacttgccgcaaacttcctgccagagcttttctctcaccagcgccgagacattccccacgaaaacgcccgcctgcaattcaagcatccagcgggtgagttcgcctcgcacgctggctggagccttttccaggatcatgacgaccgtggcttctcacctccttcctgaggatcgccgtagttgacgccccccggggcttcctcgccttgcggactccaaagccagccgggagcggcggcgttacggtccatttcctcccttccctcggtttcacggaggccggcgcccagcgcccggtcgatgtcggggatgattctctgcagcaaccgattgtcaacgaaggcgtcccggcatttccttctcacgacgccctccataggagcggctttctccgccgcggctcggaacgcgatggggatggtcacttccgttttgtacaagtccgcgacgtcgtaaacgaaggagagcatcttgccggtgtgaatgaaacccagggcgggcgaatagccagcggaaacaatggcggcgtgacacacgccgtagagacagctattggcgacggagagggcgcgattgacggggtccgcggttcgccactcgtcgctcttgtaggagcggcccgaccaggcgacggccgtctcctggctggcgcgggcataggtgtcgcgcacccgcgctccttcccgtccccgcaactgctccacggtgagggtggggtccagcgtctcgggaaagcgcatttcgtaaagccggcgcaccaccagcagacggagttccggcgtcgagcagagccgggcttgcagcaggaggcgctcggaggagcgtgtttctcccaggccctgggcataggtacgcacgccttcttcccctgtccaaagaatggtgcagccgctgtcggacaagctgcggatggcggcgtggctgatgctggtgcccggtcccagcatcagtaccaacaacgaggcgcatggcaccggcaccctcccgttcgcgtcgtgaagcgcaatagctttctcctcctgatcgatgcggcagtgctcgacgtagagaaagctggaactatcgcggactttgggcaacaggtgcaggtctttcatggatctcctcgaacgggcgccacggagagcaggccgaagccaaaggctttgccggaaccaatgccacccacgacggtttccctgaagcggtccgcgtctttaaccgtaagcgtcccctccaataaggccgagcgaaatttcatgcgatcgcccgccggccctgtgtctgctcggtttcctgcgccccacccgatttgcaagacgcggaaagtttccacctggaagcggcctttggcgcccttgctggcgaaccactcacgtatcacatcctcggggttctggcccttatcccaggtcagcgccacgcgtttgctttgggctttcgggcgaccccacttatctatcccctctcgcgctttcgtaagatcaacgccgttggtgctggtttttatcttcttgctcagattgacgcggatacggaagcgaagctgttggccctttgcgaagcgcggctcgaattcctctacctgcgggggagcggcaagaggattcagaaggaaaggagcgttgtggaaggcgtagccccagtcaggctttacggcagagttggactggaccagaatcacgacccgcccacccggttgcgggtcgatgcggaagaggaatccggagcccgccccgcgctctacatgagccggcttctcgccaaagtcctcccgcttgaaaggttccaggaagtctttgtcatcggattttcgggatgcggagggaaacgccatgcaaaggcgttggtggacgtgatagaggttacgcaaccatatccgtccgggccgggggcggtcggggttggtgccgacatcaattaagaggcaggacaggtacatggctactccacctcctcggcggcaaggcgcctgcggcgcgtttccagggagcggaacttgatgatctcgtcccgcttctggatgatcaagctgcgccagcgcgcctcttccggattgatgcggtccaggcccatgcccaagccgtattcgatcatggtgaccgcgtcgtggcagaggcggcagagagagcgcaaatcctcggggagttcatcaccgcccgcacggcggtaggtgatgtgctgcacggtggtggcgggagatttgcaaaaaacacacaggtgatggtcgtcgtcgagccgcttcttccgttggactctgtactcggtgttggtgtaatccgctctcgggcggagaggtggtggcgtgttgctctgtgctggctgagctgcaagcgtgacgtcgccgtcgggtcccactcgcaattccctgcgaacgacgaatcggggttcgtgcgagggcgggtcgaatgtccggggcacgtcgtaccagacgagcgcatcatcgggagcttctgattggttgggtgttggctcccaatcgagcaggcaatcgacggtctgtggctgtgggtccccttccagccgcttgcgccaaggaaccgacgtaagggctgaaagcaaatcaagaaaattgccggcgggatgctccagcagagggcgagaaggcgggcagcacttcctaccgaggtagagcgtccatttcggcgccttgattgccacttccagttcggcgatgagatccggtgcaccctgaagagcgacgagaaacgaggcgtcacaaaggtattcgcggcgagtaatgagagtttcaatttcgtgtgtcgaggctgtcttcttgatttcgccgtctgctctaagtagaccgatctttgccccgaccgtgtggtagtcccaccagcgatcgccgggtcggtcgatgcgcacggccatcttgagcccccctccgagcaccttcaggcgatcgcgcgcctcctggcgaggccgagcttccgcgcaacatatcagaccgaaaataccggacttggtaggcgcttccatcgttctgcgaatcacgaatttagaagtatctccccaagcctgaagcggagcttccacgcgaaggaaaagtgtattggatgcagcgctcatggtcagacccccatcgccgagccgatgttcttgacctgggaccactcgaacccaatctcctttaccaatgcctcgacaaggccttctggtttcccttcgtcaccgccaagaatgtcgaatttccggtcggtcacgggtttggggggcgtcttcttcttcccgtcctcttcgtgctcccaatatcggaagggaaatcgccaaagcttggggc

SEQ ID NO: 912 - DNA, 3424 bp, Artificial Sequence
  Synthetic Oligonucleotide
caacacagtgctcatgaatttgtctagggcatgaaccggttcacccccacacgcgtggggacaacgaccttgttcacttaagggcatcccacatctgcggttcacccccacacgcgtggggacaacacttcaagaaaggtcttggttagggtattcttacaaggcaaaggccctcgaagtcctctatggctctggcagtctctccccagctccgaacccgatagccctgttctgtatcgctggtgtaaagcatcaggcatcccccatcacgggcctgtgaacaggccttgtcccatagtttatcccggactatggcggagactctgcctacaaaaacacctgctttgggctccagaagccaccgggtcaattctcccctcaggcttgggggaacacgttcaaggatcagtaccagcattgaccttcctcgctttcaagcaagaatcgccctaccgggaatgatccaaccctcctttcacttctttttcttcgggatcccacaaacctccaggggaggcagcgtcatcatcataaaggtctgcatcggaagtggttttcggcaccatgagaacgttctgcaaatccggcacaatcctccccagaagccgtgaggatacaaactgatcacgacaagctaaacgcactcgccgttccaatccctcagaagaatcagctgccgcacgaaaagcgatcgggatcgatatctcggctttgtacaaatcagcaatatcatagacaaaggagagcatcttccccgtatggatgaatccgagagcggtcgagaatccggcggatacgatagccgcatggcataccccgtaaagacaagcattggcggtagacaaagccctgtttacagggtcggccttgctccacttgtcccgctgatatttgcgacccgcccattcgattcctgtttccttagcagctctcgcataggcatcccgaatcctggctccctccatccctcggatctggcgcaaggtaagagaggtgctgaaaggttccgaaaacctcaactggtacatcctgtgaacaactttcagccttagatccgggtctgcccatagtctggcctggtgaagaaaattcctggcactcctcgtctcgcctaaaccaacggcgtaaaaccggactccttcttcaccgcaccaagccacgaggcaaccatgatccacaaggacagagacagcggcatgagtgattgacacgcctggtcccagcatcagtaatgctaggttagcgcagggaaccggtactttcccattggcatcatggatcgcaatggcttttgcgtcctgatcaacacggcaatgctcaacgtatagatagctccagccatctctcagtttcggcagtacccgtaggtcctgaaccctcattttctcgtcacccttggccccggtgaggacccggagccaccgataaaaggccaaacccgaaggccttaccggaacctataccgcggatcaatatctgcttaaaggaatccgggtcagtgactctaaggagaccctcgaaaagaaccgaacgcaaacgttgccccttgccgttcttgttcatatagacgtaccccagctgaagggtcgtagcctcctgatcgatcgagaaccctcccgagccggcatgacggtcaagccagtccaagagctggtcggtcaggacgggcacacgcttcccgacagattcttctcttgcgtcccgagatcgtttgctcagccgcctggtcgggttcgcctcaaggcgaaaccttaaacattggtctttcgagaagcgcggcccaaagggtttcacctcaggaggcgccgccaggaggtaaccagcattgtgaaaggcgtagccccagtcgggttccacggcggactgcacgatgattacggccctcccgccgaggagagggtcgatgcgaaaaagaaaccccgaacccggggcgcgctccacaccgacttgtccttctccgaaatcctcgggcttgtaggggtgaaggaagtccgcatcctcctctttcctggatcgggagggaaaggccatgcagaggcgctggtgcacgtggtaacggttccgaagccataatctccctgggcgagggcggtcgggattttcaccagtgtcgatcaatagacacgataggtacacggctattcaacctcctcggaagcaagacgccggcgtcgagtctccagggagcggaagcggatgatctcctctcgtttctgaaggatgaggccgcgccagcgggggtcctcggggtcaatgcggtccagccccattcctaggccatattcgagcatggtgacggcatcatggcacaggccgcaaagggagcgcaggtcctccagagtctcgtcaccccccgcccttcgataggtgacgtgctggacggtcattcgcgggccgggggatttgcagaagacgcacagtccggcatcggcttgaattctctcttgacggcgcttgcgatattcaattttggtgtagtccgcccgcgggcgtggtttggcagggtggggcggctggaggggctctcccaccgcgggcgatacggcgccccgcaggaggaaccgcggttcgtgtaccggcgggttgaagcataggggcacgtcataccaaacttccgcatcgtcgggggcggcatcgctttccggagtaggccgccagtccagaagcacttccaccttgccgtccggcggctgtgagtcggccctactccgcgggttccatgggacggactccagggctccctccaggctgccgtggcgggaaggattctcccacgagccacttctggccggcctcgcaaggacaggggcggagggcgggcaggatttacggccgaggtaaacgggccgcttcggagacgataaggcctcggcgacctcctggatcaacccggtgtcaccctgtaggcaaacgaggaagctggcgtcggccagatactcccggcgggtcacgagcgtcccctgggcgccggtcttcaggttgcccccggcggtcaccatcccgactcccgcccccaccgtctggtaatcccaccacctgacgccccgccggtcgacgcgcacccccatggcaaggctgttcagacggggcaggctctcccgcgccgcctgccgagacaggcccatggcgcaacagaccagccccagcacgccggacttggtgggcgcctccatggtgcggcggataacgaacttggacgtatcgccccaagcctgcagagggccttcaaggcggagaaacagcgtattggcttccgtcatttggcggcctccctggcgctcgctgcctcctccacttctttcatgacccggtccagcagttcgccgaactggccgaactcgttggagtcgccgactaccgcacgtacttgttcgtgctctttaaagcctttatcgacccaggcaaggcggtgccgccggtttgg

SEQ ID NO: 913 - DNA, 3411 bp, Artificial Sequence
  Synthetic Oligonucleotide
gtaaggtttcagagaggccgcggggtcgttcttgggcggcgccgaaggaaacgccatgcagagacgctggtgaacgcgatacacattgcgcagccaacggcggttgccccagtcctcacggtcgggattgtctccgacgttaataagcaaacaggataggtacatgggtcacacctcctcggcggctagccttcgtttgcgcgtctgcagggaccggaattcgatgatttcgttgcgcttgcggatgatctcgtctcgccagcgctcttcttcggggttgattcggtccaggcccatgcccaggccgtactcgatcatggtgaccgcgtcgtggcacaggcggcacagcgaacgcagttcgtccaagcgttcctgtcccccggcatggcgataggtaacgtgttgaacggtcgtggccggcgccttgcagaacacgcacaggtgatgatcctggtccaggcgctcttgccgaatcttcttgtacgccgtgttgccatagtcggctcgcgcgcgtggcgggcgtggcgtgcgagactgtaagggctctttcgctgcacgcagctctccaccatcgtcgactcgcaatgccttgcgaatgacaaatcgcgggcgatgcgccggcgggtcaaacgtcaacggcacgtcataccagacctccgcatcgtccggggcttcggggccgtcatccgtgggcacccaatccagtagacaatccaggactgcgggttttctgtcagccctcaggcgcgaccgccagggaagggatacaagcgcggagaccaagtccggaaactggcccggctcaacctcgaccagaggacgggacattgggcagcacttcctaccgaggtacagtgcccacttcgggttccggacggcctgtgctacttcgtcgatcactgccgcttcgccctgaatggccaccagaaagctcgcgtcgcacaggtattctctacgggtgagcatggcgccggacttcgtcttaccctcacctttggcaatgcgcatttgcatcttcgcgccgacggtgtggtaatcccaccagcggacccctgcagcgtcgcagcggacgcccattcgcaggccgctgagtttcggaagccattccgcggcggcatcggcgcgtgagacccctaacgcggcacagagcatgccgactacgccggatttcgttggggcttctgccgtacgcctgatgaggaatttcgattgctgatcaccccaggcctggagtgggccttccagccgaaggaagagcgtgtttgcactcatgacgccaccccggaattgaccacggccttctggactttcgcccaatcgaagcccatagctttcagcacctctgggactacctcatcgagcgacttggtattgtggttagcaatagccatttcctgcttgtcgtgcactccaaccaaagggaaacgaaggttgggcgagaaccagaagcgctctttcggttttccgtagccgacatcgaggtcgtaaatgtactgtcccagttgcgcgatgctctgcgagaccagatcggggtcgcctttgccaccaacggggtcggcgaaagcgttggcgtagctgatcggaacgcctcctaattggatcagtatcccatcggggggattgtgtgcagcgaaactgttttgcttgcccgtcggattagtcaaggccatgccgcggatgaaggcaccaacggtatgcgctgccagttccgtgttccctttcaggttcttgaccagtgtgtcccagtcaatcgagaagtacttgtagaaacaggccgaggcgaacatagcttcgtccacgtaacccgctccggcatcgtcgtcgggaatgtcatcggcggcgacgtagtagtcgacttctgggcgggcctcatgcgtcgagatcgcgtgagctacctggagtgctgcctcgacagtcgtgttgtgcttcttccacacttccttagcggatttgtcagcctccagcatgcgccccgacagcgccatgtccggcactgctactagctcgctgatcagttttccaaaatcaagcgccagttcttcatcagtcttcgggctgtcgtcttgcagcagcttggccatttcgtcaatcgcttcacgacttgtatagacaagcatcttgctcttatcgccgtctgcaggcccgtcttcttccgccttgccttttctcgtcttcttcgatttgaagccacaagcgttgagaataatctccgcgcgcttcttcaccccggccttaccctcgagcttatcggcgatcagtttcgccaactggcgggtacggattcctccgagcagcaacctgaactcatcactcatgcggatgctgcgcttgaggcactggctggaaatgcgcgagcgcaggacaccgccgaaatagcaggtcttgggcgcgcccaggtcgtcccgattcaggtttgcgggactgtgattctgaataacgtgaatctcgatcaacataactatatccctccgttgttttccaggaattcctccgcccacctcaggcggatggcttcactttcccatcttgaaagatcgtctgttagcttgacccagtccagttgatggtgagtggaggcgattgtgagaatcgcctgccggagcacctgttcgatttgaccgaccggcaagaccaacatgttgtcgaaggtcttgccgaaccgctgtctctcgatcttctccttagggctggagcgccggagttggcgggcgagcgtgtggcccggggagtgcctgagtggacaagaagcgtatagcttcgcgattagccacgcgacctcccgtcggggcgctcgttgattctttttgcgcaaaggccaccacaatcctgcgaacaggtcaaacccgggtaccgactcgtcgagaccttgcccggcatgggttcggagaagcccgagttcgccggtcttgaggtttcccagaaccgcaatgaattcttctgtagatgtcacttgtttcctcccttcgtgcgtttggctttcttagaggaagcggatttcggctgcatatccggcaacacactggcaatagcccgccgccgtttaagcgcctccgccgtaaaaccaggggaaagcgatcttgcgagtagtcccatcatgggccgatattccttggccgcctggagccacgcatcatcaccgttggccagcagttcccccagcttcttgaaaaccctaccctcaacatggggacgcacagagtcgacaccggaggaattcacaagtgatgctttggaagacagtttcttgtctggtgaccgcgggaccttggcagcaagcttcgagccagccttctgccactgctcgagtttattgatgcttagcgcaccaatctgcgccaacaggcacgggaagggaatcagagtttcccatccttccaggtacttgtcattcttgaccgttgagaatcccac

SEQ ID NO: 914 - DNA, 3405 bp, Artificial Sequence
  Synthetic Oligonucleotide
cggagggttgaaagatgttgattgacatgcatgtgattcagaaccacagtcccgcgaatctcaatcgggacgacttgggcgcgccgaagacgtgctactttggcggagtacttcgctctcgaatttccagtcagtgtattaaacgaagtattcgcatgagtgagcagtttagggtgctttgtggtggagtgagaacgcgccaactggcaaagttgatcactgatcggatagaaggcgggccagaggttcagaagcgcgccgagaagattctggagatttgcggtctcaagccgaagaaatcgaagaaggaggaatctgagcagagtggttcagaacggagcaagatgctggtctatacaagtcgcgacgcgattgaagaaatggcccggctacttcaagccagcactggcaagagcgatgacaagttggccgaggaattcggcaaactaattgccacgcggaccgcggttccagatatggcgctcagtgggcggatgctggagacaggcgtgcttaaagataccaccgttgaagccgctttgcaggtagcgcatgccatttccacccacgaggcgcggccggaagtggattactacgttgccgccgacgatatcccaggggacgacgcgggagccggctatgtggacgaggccatgtttgcctcggcttgcttctacaagtacttctctatccactgggagatgctggtcgagaatcttcaaggctacttggagttggccgcacatacggtcggggcattcattcggggtgctgcgctgaccaacccgacgggaaagcagaacagttttgccgcgcacaatccaccggatggcatgcttatcgagttcaaggacacgccaatcagttacgcgaatgcgtttgcgaaaccggtgtctctcgacggggggcgggacatgatctcgcagagcattgcgcaattgagccagtatgcctacgacctggaagcgggttatggtccgcctcgggaacgtttctggttctcgcctaatgagaggtattccctgaatgttgagaaggacacggagcgttcccttactccaaacagctacaagtctttggatgccttgatcgaggcggtgattaagggtattgacccgaagttggactggcaacaagtgcagcaagccgtagtctgttccgaggtggccccatgagtggaaacacgctctttctacggctcgaaggccctatgcaggcatggggcaatcaggagtcgaagtttgttattcgccgcacgacggacgcaccaacgaagtccggggtgctcggcctattatgcgccgcgatgggtgtgcctagagtcgaagcgtcacgcgagcggctgccgcgactggtggcactgcaaatggccgtgcgttgcgacaggccgggcatacactggtgggattaccacaccgtcggcgccggaatgcgcatgagaacggcggagggcgggatgaaggcggacaccatgctgaccaggcgcgaatacttgtgtgacgccagtttccttgttgtccttcagggcgatccgccggtgatcgaggagttggccggcgccttgcggaatccggtatggccgctgtacttggggagaaaatgctgccccgtctcgcgaccagtggcagaggcggagtcagtgacgtgctccgatctcttgtcggccctagcgttccttccgtggcggccgcgatatgaaggtgacgaagtccctgaatccgtggattgtctgttcgattgggtgccgactgcccaggaaagcgaagcaccgccggagacggaagtctggtatgacgtaccgatttcgtttgaaccgccaagccatcgaccaaggtttgtttctcgaaggcaattgcagttgggcagggacggtcaagtggagaccggagagccaacccaacgcaggactccgcgcccgccgcggccacgcgccaattacgggaatacacagtaccggcgggttcgccaagagcgattagatcgtgacaagcatctctgtgtcttctgcaagtcttccgcgacgactgtacagcatgtcacttatcggcacgctggcggcgacgaacaaattgaggaacttcgttcactctgtcgcctgtgccatgacgccgtgacaatgatcgaatatggcctcgggatgggactggacagaatcaatcccgaggaacagcgatggcgagacacgattattcgtaagcgggacgagatcatacgctttcggtccctggagacgcggcgaaggagactggcggcagaggaggtcgaataatgtacctgtcgcacctcttgatcaatgttggcgacaatccggaccggccgcggccggggcggctgtggctgcgaaatgtttaccatgtgcaccagcggctttggatggcgtttcccaccgaggcgcaacgcacggccgatccggagttccttgcccccttcaatccgaagggcttcgcggccccgcgcttcctctttcgtgtggacaatagcgtcgagcgcaattgtccccgcgcagtaatcgtggtcctgtcggggtcggaaccgaattggcgctatgcctttcagaatgcgcgcacgttccttgccgccgaagcggaaacgcgcgaatatagtccaacgtttgcgacggggcaggagttctgcttccgcattcgcgtcaacttgagcaagaaaagcgtgaagtatcgcaagacaggggagaagacggacacagaaggacgcccgcgaacacagggcaagcgtattgcgctgacgtgggagaaggaccagcggcctgacgaggtcatcgttccctggtttgcgagaaaggggccacggaacggcttcgaactgcggaaatgcgaagtgattcaaatcggttgggtaaacgcgtttcggcccggcaaaggcgagcggatgaagttccggtccgcgcttctcgaaggcattttcgcggtaaaggacgagaaagcgcttgccgatgctattgccgccggcatcggttcggcgaaggcgtttggttttggtttgctttcggttgcgccgcgctgattggcgcggcgttgcagcgcgggttctttgacagttgaatcgtgtgagagcggcgtgaggatgttgcctacggtgttgaagacacgggcgggacgcccgtgccacgaacttgggaaaagggggaagccatgagaacaaaggactatcacgaaatcccgaaggtgcgcgataagtggagttacctgtacgtcgagcactgccgggtggatcaggaagaaaaagcgattgcggtgcatgatcagtacggggtgacgccggtaccgtgcgcgaatttgacgttgttgatgctgggtcccggcacgaagatcacgcatgcggccattacaacgctggcggacacgggctgtatggttgtctggtgcggggaacagggggtgcgcttct

SEQ ID NO: 915 - DNA, 3389 bp, Artificial Sequence
  Synthetic Oligonucleotide
caagacgttgaggccgccatgcaggtggcacacgctatctccactcacgcagtagtcaacgaggtggactacttcacggcagtggatgaccttgggcggtcgggtggtggcgctggtcacgtggacgaggggatgttcaactccgcctgcttctacaagtacttcagtctggactgggaccagttgatgaagaacctcagtggcgagcaggcacccgatgacgggaccaaacgcttcgccgcacgcatcctcgggcacttcataagggcagccgcactcacaacaccctccggaaagcagaacagcttcgcatctcactgcgagccatgtggcattcttgccgagatcaagcgcaacagagcagtcccgacggtctacgcgaacgcgttcgctgatccggttgaacgcacaggcaaaccgagcgacgacgccccggacgaacagagtcttgagggacgcagcatcgcttgtctagctgaccacgcgcactcgatacgaaaggcctacgacacggactccactatgttgtggtacagcccgaagctgtggcgctatccactgcaatactgggagcgacgcgccgatggcaaacggctcgaagcgaaactcctgacagagcatcgattcgacacgcttgatgggctggtcgagggagtcgtcgcgtgcgtcgtccccggactgaggtggtcggacctgaagaacgaggaaaaacccggagggtgaaagtggcaactgccatgaacacgctgtttctcagactggagggccccctccaatcctggggaggcaactcgagactggtcattcgacgaacgtcggacgcccccacgaaatccggagtcatcgggctcctctgctgtgcaatgggactaacgcggcatgaggcacaagacactctgtcggcgctgcgccgtctccgaatggctgtgcgcatcgaccgctctggcgagagatggtgggactaccataccatcggggccggcagtggcgttctggccgccgatgggagcgtcaagacaactgccagcaccggggagttggagacactgatctcacgccgggaatacctggcggacgccagcttcctcgtagctctccagggcgagccacaggtcattgacaccctccggcgggtcgtggagcacccgacctggcccgtcttcctgggtcgcaaatgctgtccgcccgccgtacctctcctcgcaacgccgctccccggcgagcactggacaaaccctggagagtacgacgatctcccgtcagccctcggcgcagtgccctggaattcccgcagtcacggcattgactcgaaaccaccagctagtggtgtctcatgtatcgtggagtggaccccatcagccgaaaacacaaaggctccgccagaagcagaggtctggtatgacagtcccatctcgttctgtccaccggtgcaccagccacgtcttgtccttcgcatcatgctgccagtgacaatcggcgaagcgactctttccggcgcaccggtagctccacgcccacgtgctgactacaaggatcgtgaatacgcgaagaagcgcacagctaggctcgatttcgatgcaggcctctgtgtcttctgcaaggccccagcagtcccagtacaccacatcacctatcgccgcgccggaggcaacgaagcggtggaggacttgcgctccttgtgccgactctgccacgacgccatcacgatgatcgagtatggccatggcatgggactggaccggatcaatcccgaggacatccaatggcgcccagccatcatcgagaagaggcagcagattatcgagtatcggtcgttggagatcagacgtcggcggctgtccccggaggaggtggagtagcgatgtacctgtcatgtctcctcatcgacaccggcaccaaccctgacagaccacgtcccggccgcacctggctacgccagccctaccgcattcaccaacgcctgtgcatgggcttcccggaggaagcgagcaaggctgcagaccccgaattcctgaagccgtatgagcccgcgcgtttccacggcgtccacgagaagacccggactgcggagcacgcgttcttgtacagggtcgaccccctacccggagggagggcgatggttgtcgtgcaatcggcaccctgtcccgactggacctacgcattccagaacgcgatgcaccttctggtcggaccgccggatgtgaagccagtcgagtactgctacgcctccggacagacgcttgtcttccgcctccgcgccaacccgacaaggcgagacaatcacacgaagaagcgcgagggagtgctgacggaggacaagcagcggaagtggctcgaaaggaaggggcgggaaggaggcttcgaggtgctctcagtcaccatcaccgacgagagcttcaaacgagcctttcgcgggcatccgggagatgacgccgaacccatgtcacatcttgccatccggtacgacggggttctgcgagtgacagaccctgatgccttccggaaaacaatcatcgccggcatcggcagcggcaaggcattcggcttcggtctcctctcggtcgcaccgttcaggagatagtcatcatgaggacgctcttcgagttgcctcgcttccaggaccggtggagctacctgtacctggaaatggggcgacttgatgtcgactctctcgggctctgcttccgacagagcgagaacgtcacgccggtccccatcgaccaactcgccgtggtcatgctcggaccggggacaaccgtgacgcacccggcggtggccgctctgtccagaaacaactgcctcctggcgtggaccggtcaggacggcgtacgtctctatgcggcgagcacgggaggcacgtacagcgcccgccgcctcatccggcaggccgagttggtgagcaacgaagagtcgcgcctccacgttgcctggcgtatgtaccgctttcgcttcaacgaaaccataccggaagttgtcagtctggagagcattcggggaatggaggggttgcgcgttcgaaagacatatgccgatgcgtcacgaacctatggcgtggaggggaaagggagaaaatacgatcagggcaactggaacgcagccgatcccgtcaaccgcgctctgtccgcagcaaacgcgtgcctctatggcgtgtgccacgccgcgattctctctgccgggtactctccggggctgggcttcgttcacgccggcaagatgctgagcttcgtctacgacgttgctgatctgtacaagacctcgctgaccatccccgttgcgttccaggcagttgccgaggctccgcaggagcgggagcgtgcggtccgcatcaggtgccggacagcgttccacgagttcaagctgatggagcgcgtgattcccgacattgcgga

SEQ ID NO: 916 - DNA, 3380 bp, Artificial Sequence
  Synthetic Oligonucleotide
acgcgccgcggacggccggaagaagacagccgaactcgtcactgatcgccggttcgatgtgctgggtggtgaaactgagaagcccaccggcttagtggaggctgtcgtgaaggaggtcaccggcctcgagtgggcgaatgtctgcaacgccggcaaggttgccgcaaaggaggcgcgacgatgagcgacgcgcccaacacgctcttccttcgcctggaaggcccccttcaggcttggggggatgcgtcgaaattcgtcatccgccgcacgatggacgctccgaccaagtcgggagtgctcgggctcatctgctgcgcgatggggttgtcgaggcagcaggcccgggagcatctgcccaggctcaacatcctgagaatgggcgtccgcatcgaccgccccggcgcacgctggtgggactatcacaccgtgggcgccaagattggattgctgaaagccgaaggcgggatcaagcgcacagcgtccacaaaggagatcgagacgcttgtcacccgccgggagtatatggccgacgctagcttcctcgtagcacttcacggtgatgccgaagtgatcaggtgcctgaaggatgccttggcgcatccgaagtggccgcttttcctggggcgcaagtcgtgcccgccatccaggccgatcttcgcaggcgagattcgatgcgacgatccgctgacggccttgcgacgtcgatcttggcgaccgcgttgtgagtctgacaaacgaccgaaggaaggatccgtgccctgcctagtcgaatggcaaccgtcgaaagaggagccgaccgcgccgtcggatgccgaggtttggtacgacgcgccggtctcgttcgatccaccggtgcatgagccgcggctggtccaacgcaagcgcatcgaagtgagagtcggtgagccggtccagcatcggatgccgcctccgccgcacccgcgggccgactatggtaacaccgagtacaaggcacgtcggcaagagcgcctggaccgcgaccatcacctctgcgtcttctgcaagtccccagcaaccactgttcaacatgtcacctatcgccacgccgggggcgaggaatgtctcgatgaactccgctctctctgccggctctgccacgacgcagtgaccatgatcgagtacggcctggggatgggtctggaccgcataaacccggaggatctgcggtggcgtgagaagatcatccagaaacgcggcgagatcatccgattccgttccctcgcaacccggcgccgccgccttggcgctgaggaggtcgagtagacatgcaccagtcctgcctgctcatcgacgtcggcatgaatccagatcggccacgcccaggccggcagtggctcaggaaccgctaccgggtccaccagcgcctatgcatggcgtttccatccgcgtccaagacgtccgatgacccggacttcatcagacccttcaaccccgacgagttggaccgcaaacaagttcatgtcgctcgaggggcggatgctggttttctcttccgcatagacccgcagtttcgcggccgggccgtcatcctcgtccagtctgccgtgaagcccgactgggactacgctttccacaatgccagtcaccttctggcggcgcctccagagtcacagctggccgatccacaattcgaaaagggtcagcgtcttcgattccgcctcgtggcgaatcccacccgcaagatcgacacgaagagcggaccggacgggcaccgcaggaacggaaggcgagtccctgtgaagactgagaacctcattgaatggctcacccgccgggccgagccggcgggattctccctagagacggattccaccaacattcagcctggctacatctacgtgaacgggatccggaatggtaatcggcagcgcctgcgctctgtccgctacgacgggattctcaagatcaccgacgttgcccgttttcaaagaaccctggtccagggcatagggccaggcaaggccttcggcttcggtctcctctccgtcgccgcgagctggtccaagcgcacgacggacggagcaacctgagcgcccagcctatagctgtgggggatgtagggatggacgacctgcatgagttgccgaaggtccgggatagcctgagcttcctgtacgtggagcatgtccggatcgaccagcaccatagggcaatcgcgctgcaccggctcgacgagagcggcaaccacgtcgacatcccggtcccgattgcgtcgctccagcttctcatgctcggcccgggagtgtccatcacccatgccgccatctgcgctctgtccaagaccagttgtctcgtgctgtggtgtggggaggagggagtccgcctctacgcgtctggcaccggcggtacgaggtctgctgcgaagctcgtacgacaggcgagccttgcctccgacgagaagtccaggctggctgttgtagaacgcatgtaccgcaagcggcttggcccgctcgaccctggctacactctccagcagatccgcgggatggagggcatccgtgtccgcgaggcttacgcagcagccagtcgaaggacaggcactccctggcatggtcgctcctacaagagagaacggtggggtgctgcagactctgtgaaccgggctctctccgctgcaaactcatgcctgtacgggatctgccacgctgccatactcgctacaggctactgctcggcgatcggcttcatccatacgggcaagcagctctccttcgtctacgacatcgcggacctctacaaagtcgacctcacgattcccgtcgcctttgaggctgcagcggaaggcgacagcgagatagaaagacgcgtgcgcattgccctccgggaccgctttggccaaacgcgactgctccagcgcgtgttcccggatatcgaggattgtctggctgtcgattcgcaggatgtgcagccgatcgcgactcagcagccggatttcgacgtggacggcgcggcgcccggcccgctctgggatccggatggcaatgttcagggaggggtggaccatagccaggctagcgatccggaatcttcggatcgcggaggctagcaggatggttgtgttcatcttggaaagggtgcccacctcgcttcgcggcgagatcacccggtggatgctcgagccccacgcgggggtcttcgtgggcacgatgtctgcaatggttcgggacaggctctggctgaagatcaaccgaaagctcaaggacggggcagcagtcggcatacactcaagtgataacgaacagggcttcgtgattcgcacctggggagggacctccaggcagatcgaggacttcgagggcctctttcttgtgaaacgccgaaccgcacgcaagtagccagtgtgttccccacgcacgtgg

SEQ ID NO: 917 - DNA, 3365 bp, Artificial Sequence
  Synthetic Oligonucleotide
aattcgttccatcagtttctctccccggaagacatcgcgcagcgtccgccggatccgcgtttcaatatcgaggggggactctgccgcgatgcggaacgcggcgggaatggtcagatgttccttgtagagatcggcaatgtcgtaaacgaacgagagttgctttccgcagtggatgaacccaagccccggggaatacccgccacagagaatggcggcatgcacgaggccgtagaggcacgagttggcgcaggagagggcgcggttgaccggatcggcattttcccaagagtctcgcttgtaactgcgcccattccagggcacgccatactcggcgctggcgtgggcgtaggcttcacggacgcggatcccttcccggccccgaagctgctggagcgtcatgcccggatccatcggttccttgaaccgtttgcagtacatccggacaacaaccttgaggcgagtcaccgggtgactcgccaggctggcctgacgctggagatttcgcgccgaacgcgccagccccatgccctgggcgtagtaacggacgccgtgttcccctatccagagaaccaggcacccgttctctgacagggaatgaaccgcctgatgggtcaccttcgtgcccggtcccaagaggagcactccaagtgcggccaccggcatgaggctgatgccgtcctgccgatagagagcaatggcgtgctcctcctgatccacgacggcgtgttcgacgtagaggtaggagagtttgtcgctgaagcgcggcaggtcctgcgggttgatgggcgtgcggttcaaggtgcgacactcaccggtacaggtacaacactcaagagtccgaacccgaacgacttggccgatccaatgcccagggcaagggtctggccgaagagcgaggcgtcagtgaccgtcaactgtccctccagcagggcggagcggaatttcatgcgccgcttgacgtcatcctcctcattggaggacttgttccccggtcgctgcccactgacccaaccgagacgcatcaaatggctgtcccccaacgcaaatccctttcgggcccccttctctgaaaaccagggcaggatgaagtcctgggggtctttgccctcttctttgggccaggtccacgccacgcgctttccctgagacttcgggcggccctgagcgtcggttttttccgacttgtactggcgcaggtccttcactccttccgcgtcccggcccgtcccggtcttcctgctcaggttgacgcagatgcgataccgaagggcttgaccggcttcgaactgaggattgtactctgtcgtctgaggccgagcggccaggaacatcggaacattctggaacgcgtacttccaatcgggttttacctccgactgtaccagaatgacaacacgcggagagttttcccccagtgagtagtcaacgcgaaacaggaacagggttcttttcgattcatccgggacatcatgagtccccaggaaaccctccggagagaacggtttcagaaagaaggggtcgccctcgagttgcgaatgcgaggggaaagccatcgagaggcgctgatgcacatggtacaggttgcgcagccaggcgcggcccggtcgggggcggtcggggttgctgcccacgtcaatcaagagttgcgacaggtacattattccacctcctctgcggcgagtttgcgccgccgcgtttcgagcgaccggaactggatgatttcttcgcgtttcctgataatctgctcgcgccagcgctcttcctcggggttgatgcggtccagacccatacccaggccatactcgatcatcgtgacggcgtcgtggcaaagacggcagagcgcgcgcagttcttccaggcgctcgccccccccggcgtggcgataggtgatgtgttgcaccgtggtggcgcgggacttgcagaagacacacagatggcggtcgtgatcgaggcgttcctgacgtttcttccgatactcggaattcgtatagtcggcgcggggacgcggaggcgcgccgacggaagacggtgagggcactcggtcaatccgaaccctgaactccttcgctgtcgcttcctctttgctcgcagtcaactgcgcgcgaacgacaaaacggggacggtgagacgggggatcgaacgtcagcggcacatcgtaccagacaagggcatcggcgggcgcttcgggttcggagtcagtcggaacccagtcgagcagacagtcgagcgatgccgggcgcgcgtcttccgtgagacgcggacgccagggaacggacgccagggtttcgagcaagccgccatactccccagccggaaaatcttgttcgagtatcggccgggacggcgggcaacactttcgcccaagatagagcgtccatttgggggcgctcagcgcgtcccgcaattcggcgatcagagcgggttccccctggagcgcgaccaggaaagaggcgtcgcccaggtactcgcgccgggtgagcatggcgccggacttggttttcccctcggcggtacgcatttccatctctgcgcccacggtgtgataatcccaactgcggacaccgggacgatccatgcgtacccccatgcgcagggccgcgagtcgcggcaaccacgtgtcggcggcttcggaacgggggacacccagagcggcgcaaagcaaaccgatgactccggatttcgtcggggcctctcccgagcgccggaccccgaacttcgactcctgatcgccccacgcctgcagagggccttccaggcgaagaaagagggtctgaacgctcatggcgtcacaacctcctcttgaaccttcgcccactcaaaacccaaggttttcaccactgccgggatcaacgcgtcgagtgacttgatattattcccatcgtttgccaaaggaacttcccgattcttctccgaaattgtaaggggataacgaagatttggagaaaaccagaaccgatgtgtcggcttcccatatccctcgtccaaatcgtgagcgtactgacccaactgcgccatgctttgcgagacgatatcccgctgatcattcccggaaacaggtcttgcaaaggcgttcgcgtaactgacgggggatgaattccgtatttcaaccaggatcccatcgggaagattgtgggcggcaaaactgttctgtttcccggacggattggcgaacgccacgccgcgcaggaaagcgcctaccgtgtgggcggccagtttctcgtacccgtctccataccctttcaggttggctgtcagcgtctcccaatgaatcgagaaatacttgtagaaacaggcggaagaaaacagagcctcgtccacatagcccgctccggcgtcatcacccgggatgtcgtccgccgcgacgt

SEQ ID NO: 918 - DNA, 3348 bp, Artificial Sequence
  Synthetic Oligonucleotide
tgccaagaccatattcgatcatggttactgcgtcgtgacaaagccgacaaagcgagcgtagatcgtcttgggactcatcaccacctgccctgcgataggtaatgtgttgcacggttgtcgccggtgccttgcaaaaaacacaaagcccgttgtcggtagcaagtctggtcgatctggcgtcgcgatacttgctgttggtgtaatttgcccgtggccgcggcggaaagggggtcgaattctgaacgggcgttggcgacgcctcaatctgaccctcaggccctatattcaattgcttacgaatgataaatctgggaccatgggatggcggttcgaatgtcagcggcgtgtcgtaccaaacaagcgcatctgggggagcttccggctcctcgggtgttggtttccagtcgagaaggcaatccaggttttgaggcgccaaatcgcctctgaaccggcgtctccattccactgatttcagcgccaattccaaattggggaaagtcttatcgtgattccctgactcgattagaggtcgggctggtggacatgactttcttccgagatagagagtccacttaggtttttctactgcttcacttagttcatagatgagacactcatcatcaccttgtagggccacaagaaaggaagcgtcgcatagatattctcgcctcgtcagcatagcccctggcttggtttttccttctgcttcggcgattcgcatccgcatacctgcgccgaccgtgtgataatcccaccatcggacacctggagcatcaatccggacacccatactcaatgcgctaagcctcggaagccactcttgagaagcctccgagcggttcacagccagagccgcacacagcattccgatcacgcccgactttgtgggcgcctccatcgttcggcggatgacgaacttcgagttgtccccccatgcttgaagcgggctttccaagcgaagaaacagagtgtaagcgctcattaggtaaactccgggctaatgaaaaccccttgaaccgcctcccagttatgaccagtggcgccgacaactgaagcgactaattcctccagcgacttgaggttgttttctgcaaggattatctccttcttattttcgatgacattcaaggggtaccgaagattgggagagaaccagaatctctcccgtggcttacggtatccagtgtccaagtcgtgaatgtattgccccagttgagcaatgctctgcgatatgatgtctcgttgtccgtgggccacaggtttggcgaatgcattcgcgtagctgatgggagagtccttaatttctactagcatcccatccggcggattgtgcgctgcgaagctattttgcttgccactaggtgttgttagcgccgctccctttatgaatgcccctattgtgtgggcagctaaatgctctttattgccattgaagcctttgagattatttacaagcgtttcccagttaatcgagaaatacttgtagaaacatgcggaggaaaacatagcctcgtccagataacctgccccagcatcttcggcggggatatcgtccgcagcgacgaaataatctacctcgggtcgggcttcatgtgttgagatcgcatgagctacctgtaatgcggcttctacggttgtgtctttcagaacaccagtctccaacatacggccactgagagcgatatccggtacggctgtccgttgcgcaatcagtttaccaaagtcatgagccagttgtttgtcggtttttgactcgtctttttgcaagatgccggccatttcactaatcgcctcgcgagtcgtatagaccagcatattgctcttgctgctatctggtgtgttatcttcttcagcgcttttcttgttcgccttcttcaacttcaatccgcaaagggctagaatcttctctacacgtttcttgatgtcaggtttatctatggccgcctcggcgatcaacttcgctaattgtcgggtgcgaatcccaccgcacagtttcttgaactctttactcatacggatggttcgtttaatacactggctggagatacgagatcgcataacgccgccgaagtaacaggtcttgggcgctcccagatcgtcgcggttcaggttggctggactgtgattttgaatggagtggatctcgattagcataattgaatcctttctttgatttttagaaattgttttgcccacttgagtcggattatttcacggtcccaaatggacagatcatctgttaatttcacccagtcgactcccaggtcgtttgagcctacccaatcaagagcccattttagagctggctcgatctgtcctattggcaacagaagcataccgtcgaactttttctggtatcgggatctagcccttaattcggttggctgacaacgtcctaattggagcgcaaggccgttttgtctagattgcgtgacttgacaacatgcgtagagttttgcaatcaaccaagcgacttcgcggcgaggtgctctctcgtttctttgacgtaacggccaccataggccactgaacagatcaaaaccatcgactgactcgttaagcccttgccccgagtgagttctcaagattcccaagtctctcggcttcaaatgtgttaacacttcaatgtactgatccgttgcgcccatttctttcctcctccgttcgggacagctcatcatccaaacccgttgttagccgcatgttcggccctacgcaagcaatcttttgtcgcctttgcaatgcggccgttgtgaaaccaggtgaaagcgatttggcaattgcgtgcgccatcgtgcaatattcgccagccgcttgttcccacccgtaggttccgcaaactaattcctgagcctttgccgagacggtgttttcgatattaggccgaatggtggcgatcgtagaggtacccatagcccctgatctcagtatactcgctgtctcattctcaagccgtcccccttcattatgccagtgtcgcaaaaaggatgtcgcattagcctgaatggattctgatggtaggagatcaatggttcgttcccaaacgtcaacgttttttgccttgtcagtggcaaaccctacaacaagaatcgatgttgacttttctctacttacaaattttccagtttgggttatacgtgaaaacagattgggccacgggcggtccattctgaatttgcgcgctgccgtcaagtcagacgccctcaaagacttgcgtggcgtctcatctaaataaacaacatgcggatcattccaaagatcattttcctgctttccagccgtttgaaactcacaagtttgaataagaaatgtttccttcccgccacaacagccacacgtacccggcgg

SEQ ID NO: 919 - DNA, 3334 bp, Artificial Sequence
  Synthetic Oligonucleotide
attcggcctaatatcgaaaacaccgtctcggcaaaggcgcaggaattagtttgcggaacctacgggtgggaacaagcggctggcgaatattgcacgatggcgcacgcaattgccaaatcgctttcacctggtttcacaacggccgcattgcaaaggcgacaaaagattgcttgcgtagggccgaacatgcggctaacaacgggtttggatgatgagctgtcccgaacggaggaggaaagaaatgggcgcaacggatcagtacattgaagtgttaacacatttgaagccgagagacttgggaatcttgagaactcactcggggcaagggcttaacgagtcagtcgatggttttgatctgttcagtggcctatggtggccgttacgtcaaagaaacgagagagcacctcgccgcgaagtcgcttggttgattgcaaaactctacgcatgttgtcaagtcacgcaatctagacaaaacggccttgcgctccaattaggacgttgtcagccaaccgaattaagggctagatcccgataccagaaaaagttcgacggtatgcttctgttgccaataggacagatcgagccagctctaaaatgggctcttgattgggtaggctcaaacgacctgggagtcgactgggtgaaattaacagatgatctgtccatttgggaccgtgaaataatccgactcaagtgggcaaaacaatttctaaaaatcaaagaaaggattcaattatgctaatcgagatccactccattcaaaatcacagtccagccaacctgaaccgcgacgatctgggagcgcccaagacctgttacttcggcggcgttatgcgatctcgtatctccagccagtgtattaaacgaaccatccgtatgagtaaagagttcaagaaactgtgcggtgggattcgcacccgacaattagcgaagttgatcgccgaggcggccatagataaacctgacatcaagaaacgtgtagagaagattctagccctttgcggattgaagttgaagaaggcgaacaagaaaagcgctgaagaagataacacaccagatagcagcaagagcaatatgctggtctatacgactcgcgaggcgattagtgaaatggccggcatcttgcaaaaagacgagtcaaaaaccgacaaacaactggctcatgactttggtaaactgattgcgcaacggacagccgtaccggatatcgctctcagtggccgtatgttggagactggtgttctgaaagacacaaccgtagaagccgcattacaggtagctcatgcgatctcaacacatgaagcccgacccgaggtagattatttcgtcgctgcggacgatatccccgccgaagatgctggggcaggttatctggacgaggctatgttttcctccgcatgtttctacaagtatttctcgattaactgggaaacgcttgtaaataatctcaaaggcttcaatggcaataaagagcatttagctgcccacacaataggggcattcataaagggagcggcgctaacaacacctagtggcaagcaaaatagcttcgcagcgcacaatccgccggatgggatgctagtagaaattaaggactctcccatcagctacgcgaatgcattcgccaaacctgtggcccacggacaacgagacatcatatcgcagagcattgctcaactggggcaatacattcacgacttggacactggataccgtaagccacgggagagattctggttctctcccaatcttcggtaccccttgaatgtcatcgaaaataagaaggagataatccttgcagaaaacaacctcaagtcgctggaggaattagtcgcttcagttgtcggcgccactggtcataactgggaggcggttcaaggggttttcattagcccggagtttacctaatgagcgcttacactctgtttcttcgcttggaaagcccgcttcaagcatggggggacaactcgaagttcgtcatccgccgaacgatggaggcgcccacaaagtcgggcgtgatcggaatgctgtgtgcggctctggctgtgaaccgctcggaggcttctcaagagtggcttccgaggcttagcgcattgagtatgggtgtccggattgatgctccaggtgtccgatggtgggattatcacacggtcggcgcaggtatgcggatgcgaatcgccgaagcagaaggaaaaaccaagccaggggctatgctgacgaggcgagaatatctatgcgacgcttcctttcttgtggccctacaaggtgatgatgagtgtctcatctatgaactaagtgaagcagtagaaaaacctaagtggactctctatctcggaagaaagtcatgtccaccagcccgacctctaatcgagtcagggaatcacgataagactttccccaatttggaattggcgctgaaatcagtggaatggagacgccggttcagaggcgatttggcgcctcaaaacctggattgccttctcgactggaaaccaacacccgaggagccggaagctcccccagatgcgcttgtttggtacgacacgccgctgacattcgaaccgccatcccatggtcccagatttatcattcgtaagcaattgaatatagggcctgagggtcagattgaggcgtcgccaacgcccgttcagaattcgaccccctttccgccgcggccacgggcaaattacaccaacagcaagtatcgcgacgccagatcgaccagacttgctaccgacaacgggctttgtgttttttgcaaggcaccggcgacaaccgtgcaacacattacctatcgcagggcaggtggtgatgagtcccaagacgatctacgctcgctttgtcggctttgtcacgacgcagtaaccatgatcgaatatggtcttggcatgggcctggatcgaatcaacccgtgtgaaccccgatggcgcaacgagatagtcaagaaacgtgacgtgatagttaaataccgttcattggagacccgtcgccgacgtttgcagcccgaggaggtggaatagatatgtacctgtcctgtctcttgatcgacgtgggtagtaacccagaccgccctcgcccgggcaggctgttgctacggaacctttaccgggtccaccagcgtctatgcatggcgtttccatcgaccgaacgaaaggacaaagacccgcagttcctagacccgtatcgatctaacgacttcggcgggcaacaacgtctgtttaccgaatccgccaatgagatacataagaccaaacgcaaggacgttcatgctcctcgggatggcaaccaagggttcctatatcgtatcgatccacaacccggctgcggccgggcc

SEQ ID NO: 920 - DNA, 3286 bp, Artificial Sequence
  Synthetic Oligonucleotide
gtcatcggcgagggcgtggtgccccgcaccgccgccaagaagctgcaagcgagcggctacaccggcatcttctccgtcgagcacgaaggccccgaggacccggtcatcgcgacggcacgggccaccgcttgctcccggaggtgcttcggcaacggcgtttgaggatcatccaccgccaatgccagagccagcgcgcccgcagtagtcgcgagcaattgatcgaggatgccttcgggatggacgcttgcggacgccggggcggtgagatgccgcaattgatcctcaatcggccgtgaactgccggagccggagtgggacggttcctcggccgtcagttgttgaatccagtccttcatcagccgcaccgcctccaggtccaccgaactcgatccgatgtgcggcatgtgaccggccccgagcttggccaggcggtagagcagcacggaatgaaaagggtccccgggcgcgatgatctgcgcatccgggatgccgaagccgccctgggtgggcggctcgcgaagcgtcctggtcttcgccagcggcacttcgttgcgcacgtcgatgacggccgcgctggcgccttccggttggtggcaatgggcgcaattgacctggagataggcgcgagcgcgctgctcgaactccgtgatctccgcccggctgggcgcgggaagccgcggtggcttcgccggttcgaggaacaaaccggcttgctccagggcctgcaactggctggccgcccccggcccgtggcgcgcgtggacgtccagttgtggcggcttgaaaccgagcacggtggcggacttgggcgtgtggcagatcaggcactcgctgcggctggcaaagcgccacttcaagcgccgctcgccgcccggcgcctcgggatccttgacgacaaaggcacgctcgcctccggctgccggcgcgaggacagcgtcggtctgttcatcgttccagacgtagtcatacgcgcgccagtccgcgccgtcgaagtgcaggatctgcgtctccagccggcggcgggaggcgggattgccgcgttccagttcgagcgagagggtcttggccagcacgctgtccttcggataagtccaggcgccccggatccaaccgcgcatccggtccatgcgcgtctcgacgcccagttgtcccaggccgggaatcgcgagccagcgctcggcggtcgcgccgtcggcccacagttccaccttgatgttgtacggcatcacaccgggcgcgggggcgtaatctttcaccgacgcaaacaaacccgtctcgctgaggcggcgcgggaacgcctgccggagctgaacaggcttgcgatgggtgtgcgcatcgaccggcacggcacgcggtggtgggattaccacacggtaggagcgggaatcggcatgacaaccgctgggggcggtctgaagaccggagcccagggcacgctcatcacgcgccgggagtacctggccgacgcgagctttctcgtggcgctccagggtggtgatgcgaagttgatccatgatatcgccgcggcgattgcgtcgccgaagtggccagtattccttggccgcaagtcgtgcccgccgagtattccggtcctagccgcgccacgaagcagcgagacatggacgaatcccacagagcacagggacttgctgacagcactggggacaataccgtggtgtccacgctacgaatcggacataccgcgagaccagaacagacgccgccgagaagaggtgacgttgggttgcttgattgaatggcgcgctgtcaatgaatccgacattgctcctgctgaggccgaggtctggtacgatacaccggtctcattcgacccaccggttcatgaggcacggctggttgtccgtgatgaggtaaacgtgaaggtcggtgacgcacttcagcgtgtcgcagatccgcctccgagaccgcgcgccggttactctaccccgcaatggcgtgagaatatcagacctggaagattgaaggacgatggcggtctgtgtgttttctgcaagtctccggccacgaccgtgcagcatgtcacctatcgtcgggctgggggagatgaagacccaaaggatttgcggtcgctctgccggctctgccacgacgcggtgacgatgctcgagtacggtcttgggatgggactagaccggattaacccagaacatgcatgctggcgagaggatattatccgcgcgcgtgatgaaatccgtcggtggcgaagcgaggaaggccgccgccgtgctttgaggggcgcgcccgagcgtgtccgtcgagaactgcttgaagaagatgaggaataggctatgtatcactcccatttgcttatcaatataggtgacaatcccgaccgtccggactggaaaatctgtcgtcgctggttgcgcaatctgtaccgtgtacatcagcggttgtgcctggcgtttccgtcaggcattctgttcagggaacccaacgggggcgatgcaaatcaggcgcgaaacggcgaaaacggctttctctttcgcattgactacccggttgatttcaggcaaggaggtcggaagccgctcatcattattcagtcggcttcagataaagaacctgactgggaccgcgcttttggcttgatgaaagacaaaacgaatgatctgggccatcctatcggggatgccggtttcctgcttgccgcaccgccacagatgaagtccgtctctatagccgttgacggcaacgagctggtcctgaaaggcgggaaggaaaactaccgcatccgtcctggcgagcttgtgcgattccggctccgcgccaatccgacacggaaaattcaagacggctcgtccaatggaaaacgcatgcgtgtcgatccgactttggaagaccatgcccgctgggtagctggcaaacttggaagcgctgctgactctccaatctgtattgagaagtttgttcccggatgggcctatggctggcgaagtaagtacgaacctcagcccggccagcgcatgcagtggtggtctgtgctgtttgaaggaaagtttcgaatgggggatccggtggtactgaaggaacttctcgaaacaggcattggctccgctaaggcattcgggtttgggcttttgtcgattgcgagggtatagcgtatgcgcaaccttcatgaccttccaaagtttgcggaccgctggagctatctgtaccttgagcacggccggctggagaaggaagcaagcgcgctgactttctacaaggctgaaggttcgatagatatcccgatagatcaactcggcgtgcttctgcttggtcc

SEQ ID NO: 921 - DNA, 3272 bp, Artificial Sequence
  Synthetic Oligonucleotide
cctcaagtcactggacgaactggtcgtcgaggtggtccgggctgtcggcttcgactgggcacaggtgcaggccgtcacggtaaagtaaggaggtcgtgacgatgaacgcaaacactctctttcttctcctcgaaggtccgctgcaatcctggggcagccacgagtcgaagttcctcattcgaaggaccggcgaggccccgaccaaatcgggcgttgtcggcctgctttgctccgccctgggaattcccaggataaccgcaagggaacagctcccgaagctcaacgccctggctatggcggtccgcgtcgaccggcccggcgtacgatggtgggactaccataccgtaggagcgaaaatggaaatgcgtatcgctcaaggtgaaggcaagaccaaacaaggggcgatgctcacccgccgggaatacctgtgcgacgccagttttctggtcgcccttcagggcgatcccgaattgctgctcgcggcccgacgcgcattgctgcacccgacctggccggtgtttctcggtcgcaggtcctgcccgccgtcgctgccgttggtcggccggaatgaccaatccgacataggcgactttaccgatctgccgtcagcgctatgctcgatcccctggcgaccccgccttgccggcgacgagcggcccgagcgcgtcgagtgtctgatggaatggcggccgtccccctcagaacccgaggcgccgccagacgccgaggtctggtacgatgtcgccctgtccttcgacgtgccaggccacgaggcgaggttcgttgttcgcagccagttgaccgtgggcgatggaaaaggtgttcccacaggcccgccgcgccaaaccaggaccccggccccgcctcgcccgcgcgccgattaccgcaacaccgagtatcgcaaggcccgtcaacaacgcctcgacgccgaccatggcctgtgcgtgttctgcaaggccccggccaccacggtccagcacatcacctaccgccgtgccggcggcggcgaagaacccgacgacctgcgcgctctctgccgcctctgccacgacgccgtaacgatgatcgagtacggccagggcatggggctcgaccggatcaacccggaggatccgaaactgcggaaaaagatcatcgccaagcgtgatgagattgttgccttccggtcccttgaaacccgccgtcggcgacttgcccccgaggaggtcgagtaatgtacctgtccacccttctgatcgatgtcggcagcaaccccgaccgcccccgccccggccggctgtggctgcgcaacctctaccgggtccaccagcgcctctgcatggcctttccgtcaccgcgactcactgaccgcgactcggttgattacgatccagccttcctgaagccgtacgatccggcgcatttcccggaggaccgctaccaagccgataagaagcccaagaataagcccggtggcgaagtcgaacccgatgtccttagccatgttcacgccaaacgggaccacaacgccggtttccttttccgcgtcgatccccagcccggcggcagtgcagtcatactcgtcctgtcggctgttgaaccggactgggactatgccttccacaatgcccggtatctcctggccgggccgccggccaagccgcgcccgctcgaactgtccatcgagccaggcacgcggcttcgctttcgcctcttggcaaacccaacgaagcgcccgcccctgaccaaggagcagcggctccaaaagcaggctgacggggaagtcaaaagcctcaaacgcccgcgcgtgcaactgacttggcaggccgacacggaccccgccaaggtgttcgccgactggctctgcgccagggcggaaaaggccggctttaggattgacccgaaggacctcacaatctccaacatcggctacgtgtacgtccacaagggtgggcgggaggacgctgcccagcgcttgcgctctgcacgctacgaaggcatcctcgaagtaaccgacgccgataaattcgcccaaaccctcgccgcgggccttggcccggccaaggccttcggcttcggcctgttgtctctcgcgcccgtgcgggtttgagttattccgcttcggcgatgaggccgataccgctctttgacaagtgcatacataaggcgaaaccgaaatgaagaaccttcaggaactgcctcgcttcggcgacaagctcagctacctctacatggagcatgccattatcgaccagtgcgacaaggccgttgccgcgcacgacgccgatggctccgtccccatccccgccgccggcctggccgtgctcatgctcggcccggggacctccatcacccacgccgccatcaaaaccctggccgacaacaactgccaggtcatctggaccggggaggacgccgtccgattctacgcacagggcctgggcggctctcggcacagccgaaacataatccaacaggcccgcctggtcagcaacgacatcacccggctgcaagtcgtcatccggatgtactgcatcaggttcagagaagccatcgatcccgacctcaccttgcagcagttgcggggcaaggagggcattcgagtccgccaggcctacgccgaggccgctcgcacctttggcatcaactggcaggggcgttcctacaaacgtcagcagtgggactacgccgacccgatcaaccgtgcattgtcgtccgcaaacgcctgcctgtacggcctggtccacgccgcaatcctctccggcggctacagcaccgccctgggtttcatccacaccggcaagcaactgtcctttgtgtacgatgtggccgacctctacaaggccgactacaccattcccacggccttcgccgttgtcgccggcggggcaacacaactggaacgcgaagtccgcctcacctgccgggaaaccttccgcaaggccaagctcatggaacgcatcctgcctgacattgagaaggcgctggatgttccgcccctcagcgcagccctggccgaccaggacgatgcctactccgatgacgccgccctgccggccgacctgtggcaaccggcctgcctgggaccggatacgcccatcggaaccattctgaaactggacccgcttaacttccccgtgcaggagaaacccgatgatcgtcatgatactggagcgagtgacaccctctctgcggggtgaagtgacccgctggctgatcgaggtcaaggccggcgtcttcgtgggttggctctcggccagggtccgcgaccttctgtgggacaaagtgtgcca

SEQ ID NO: 922 - DNA, 3268 bp, Artificial Sequence
  Synthetic Oligonucleotide
ggcgggggcggtccgggttgctccccacgtcaatcatgagatgcgatagatacatcattccacctcctcggcggcgagcttgcgccggcgcgtttccagcgaccggaactcgattatctggcgccgcttctcgatgattttgtcccgccaacgctccctttcgggattgatgcggtccaagcccatgcccaggccgtattcgatcatggtcacggcgtcgtggcacagacggcaaagggagcgcaggtggtcgcgcttctcgtctccccctgcgaggagataagtgatgtgatggacggttgtcgccggcgacttgcagaagacgcagaggtgatggtcttggtcgagccgttccagtcgaaccttcttatattcggtgttcccatagttggctcgcgggcgcggcggagacggcgtgtggcgttgcgcgggttttttggcaatggcagcggtggcatgggcatcttgcccatgagacacgggcgagacgcccgtgccactcttacccacgttcaactgccggcggatgacaaaccgggggcgatgcgccggcggctcgaacgtcaagggcacatcgtaccacacgagcgcgtcgtcgggcgcttcgggctgctcgggcgtcggctcccagtcaagcaggcaatccaagatttccggtacgcgatccttttccagacgcgggcgccagggaacggatgcgagcgcggttagcaggccatcatggatcatggggttcgcccacgactcgccgtcacgcggccgctcaagcaccggaacggctggcgggcagcatttccttccgaggtaaagtgtccacttcggttcttgcatcgctgcggccagttcagcaataagagccggttcgccctgaagggccacgagaaaagaggcgtcgcacaggtactcgcgccgcgtgagcattgcgccgggcttggtctttccctcgccttcggcaatgcgcatctgcatcccggcgccaaccgtatgatagtcccaccagcggatgcccggcgcgtcgcaccggacacccatgcgcagggcggtgagtttcgcaagccagtcggcggcggcggggcggggaacacccaaggcggcacacagcatcccgatcacgccggattttgtcggggcctccgccgtccgccggatgacgaacttcgattcctgatctccccacgcctgcaggggcccttccaggcggagaaagagggtgttggcgctcatggtgtcacctcggggttcacgatctccttttgcaccagagccgtcgggggacgtcgtgtgagttgtggtgtcacctcggggttcacgatctccttttgcacctgcgcccaatcaaacccgattgcggcgaccacggtggagatcagctcgtccagcgacttgatgttgttctcagtcagcgcgatctctttctgctttcttttcccgttctcctccaccgtcgtctgcgctaccagggggtagcgaagattgggggagaaccagaaccggttctccttcttcggtgcgccgtagccgatgtccaggtcgtggacgtattggcccaattgcgccacgctctgcgagatgatgtcgcgttccccttgggccaccggcttggcgaaggcattggcatagctgatcggagtgttcttgatctcgatcagcattccatcgggcggattatgcgcggcgaagctgttctgtttgcccgtcggattggtcatcgccgcgccgcgaaggaacgcgccgaccgtatgcgcagccagtttctcgttgcccttcagattcttgacaagttgattccaatcaattgagaagtacttgtagaaacaggctgaggcgaacatggcttcgtccacaaagcccgctcccgcatcgtcgccgggaatatcatcggcggcgacgtagtaatccacttccgggcgggcctcatgggttgagatcgcgtgggccacctgcagcgcggcgtccacggttgtgtcttccaggacgccggtctcgagcattctgccgctgagggccatgtccggaactgccacccgttcgctgatgagttttccaaactcctgcgccagtttctcgtcggattttccggcgtcgttctgcaggagagcggccatctgggcgattgcctctttggtcgtgtaaaccagcatgtcgctcttgttctcatccttagggttgatgccgcactctttgagaatcttcgcggcgcgtttcttgacatccgccttgcctgtcacctgctcagcaatgagtttggcgagttgccgagtgcgaatcccgccgcacaaggccttgaacgcttcgctggttcggatacttcgtttgatgcactggctggaaatgcgcgagcgcaggaccccgccgaaatagcaggtcttgggcgcgcccaagtcgtcccggttcagattcgccgggctgtggttttgaatcacatgaatctcgatcaacatggctatctcctttggctcacttctagcaattcctcggcccaccccaggcgggtcgtttcgcgttcccattgggaaagatgatctgtcagtttcacccagtcgagttgcaggttgtttgaggcgatgaggccgagcgcccattgcatggctggctcaatccggccgaccggcagggccagcatccggtcaaacctcttctggaatcgctctcgctcttcgtttggctggcagcggcgcaattggcgggcgagcgtgtcgccgggcgattgggggattgggcaaaaggcgtagagtttggcgatcagccaggcaacctcgcgccggggcgctcgctcgttcttctgccgcaatggccaccataggcccgagaacaggtcgaacccgtcaaccgtttcatcaagtccttgcccggcgtgttggcgcagcaggccgagttcgccggttttcagcttcgtcaaaacctcaataaactgctccgtggatgtcatttgccgcctcctttcttgcccttgggcttcttcgccgattctgttttcggccgcatctccggcatcacgccagcaatatggcgacgccgctccagggccgcaaccgcaaaacccggagaaagcgattttgcgaccacgtccatcattggccgatattcagtcgccgcctgctgccatgcctcatcagtgccggcaatcagctcgcccgccttcgcggaaactttctcttcgacatgggggcgaacggcggcgatcatggccgccccctcgtcctccgatctccctattcgcttctccaaccgccagccctccttccgccattgctgtggcaaggatctc

SEQ ID NO: 923 - DNA, 3178 bp, Artificial Sequence
  Synthetic Oligonucleotide
tccggggatagagtgcaggtctttattcatcattcctgattggcagaacggacagcaggccaaagccgaagcttttcgcttttccaatgccgcttctaagcgtttccaggaacagtttcgggtcatccactttgagaattccctccagtagagccgaacggaagcgcagaggattgtatgtgtgttcacgccagtagccctgtccctgttcctttgctttgacatttttaggttcaggcttggagccataaacccaacccagttgaagaagctcacagcgctgaagggtgaagcccagctttgggcttttggcagccagccagtcggcaagggcctgatccggggtggaagagggatcccaggtgagagaaacccttttgtgcaggatgttgccagtttctatggtttgaccgtcctgttgcaccttctcaggaatatgacggcgtacgctggcgtttacccgcagcctgaaccggagcagttgtcccgcttgaaactctggattatactcctttgtttccggtggcgctgccaggaaatcaagcgcgttttggaagcaataatcccaatccggctcaagaacggactggacgataataatcgcccttttatcgtttccgtcgatgttgttatcgacccggaaaaggaagggagttttttggaagtcgtttggcgaaaagggcttcaggaaatgcggatcctgctcccggcgcaaacctgaagggaacgccatggaaaggcggcggtggacgttatagatattgtccagccactttctgccggggcggggacggtctggattgcctccagtatcgatcaatagcttggacaagtagatcatccgttttcctcctctggcttcattttgcggaaacgctgcccgcgcgaacggaactcgactatatctttgcgctttgccagtattcgctcccgccagatggggtcgcaggggtcgatgcggtcggtggtcatgccggaaccgtattccagcatggtgcaggcgtcgtggcagaggcggcacagcgcccgcaggtcttccggtatttccttgcctcccgccctgcggtaattcacgtgttgaacagtcgtggcgggagctttgcataccatgcacgcggcatggtccatcacaagccgctccgccctgaccttcttatactcggaattgttataatccgcccgggttcctttgggcctccaaacgctggttccggtttccctgctcacttgcacatcctctcccacaaccagctcacgcctgatcacgaagcgcggcaaatggcggggcggctgaaaagaaaccggcagatcgtaatgaatctccgcgtcatcaggcgcatgttctccgtcctggctggggatccagtccatgacgcaaggcagtatttgcggcaggggttcattgtgccagcgcttttgcaggggaaccgcggacagcgcctcctccaaagtgttataaaagcccggagcatgctcgcccacgggacgtgaagggggacaggatttgcgccccagataaattgcccagaccggcttggccagagcggcggagagcttttccacaagttccggctcaccctgcaaggcgaccagaaaactggcgtcggcaagatattcgcggcgtgagagcaaggtctctgccctggtttttactttgcttggtgtcagggtatcagccagggcagctccaaccatggaaggttttttgggtgccttcagctctgccatgcgcattctttgtcccgctccaacagtatggaagtcccaccagcgtatgccggggcggtctatccgcacgcccatgcgcaggttggcgagttttgggagccatgaatcagcagcctccgcgcgcccaattcccatggccgcgcaaagcagccccaggacacctgattttgtgggagcgtcggtagtcctgcgcaaagcaaacttagcctcgttgctgccccaagactgcaaagccccctccaagcgcaagaataaggtgttgggtggcgcactcatgtcagccgccaacataagccttgcttttctgaacttcttcccacttgaagccgccaatataatccaacacagcgcctacaagctcattgaggttgccaatgtttctggaagccagtttggaatgctcattgccaagggaatagcgattgtttggagaaaaccagaagctgataactggggattgctcatcataatagccaagcctgatgtcgttcacgtagttggaaagctggccgatgctttgttccaccaggtccgattccttgaccacggaaactggcctgacgaatgcgttggcgtagctaataggggaattcttgaactcaacaaggatgccatcgggatagttatgagcggcgaagctgttctgtttgccactggggttggttttggcagcggcgaggagaaaggcacccacggtgtgggctgccagattcgtgtcccctttcaggttcttgaccaactgttcccaatcaatggagaagtatttgtagaaacaggctgaggcaaacatggattcgccaatatgacccgctccggcgtcttcaccgggaacatcatcggccgccacaaaatagtctatctcaggtctggcaatgtgggtggagatcgcatgtgcaacctgtagggcgccttcaacgccagtgtttttaagctctttggtctccaacatcctgccgcaaagtgctatatccggagaatggacgcagtttgtgagcaaatctttgaactgcagcagtttttcgctttcacttagtttggagtcggaaagcagctctgccatttggcgcagggcatcataagtggtaaaaaccagcatgtcagatgtatcagccgcctgctgctcatcctgatcttcatcggcttccgcgggtatcttttcggacttttttgcagctttcttggaagatttggttttgattccgcaggcttcaagaaacttggcaaccagcttcttatctttgttttccagcatttcttcaagtttctctgccagacgccttgttcggatacctcctctaaggtccgcgaattccggggcaaaacggatgctgcgcttgatgcattggctggagatgcgagaacgtaatactccaccgaaataacaggtcttgggggcgcccaagtcgtcccggttaagatttgccgggctgtgattctgaatcatatgaat

SEQ ID NO: 924 - DNA, 3111 bp, Artificial Sequence
  Synthetic Oligonucleotide
tacaacctcgatacgtgtgtccgggtctgaccataaacgagcctgatgtagcaagttgtccgcgttcctcgtctttccctggccgtaggcatagaagcgcacaccctcttctccaccccagcacaccagacatccattatcggctaaagctgaaatcgctgcatgagtgatacttgttcccggccccagcatcagaaggcacacagctgcacatgggacagggatcttcccgtttgcgtcaagcaccacgatggctttgtcttgctgctcaatcctgcagttgtccacatacaggtaactccaggaatcacggaacttgggcagaatatgcagatcatgtattctcatgccgccgcctcccggagtcagggcttaacaggcgccacagaaagaagaccgaaaccgaacgctttagccggaccgataccgcagatgaggctctcttgaaaatgggcagggtcagtgatcttgagtattccgtcgtaacggacagagcgcaggcgttggccagggccgtctgatgtcttgttcacatagatgtagcccgcctgcacggcggtggaatccctgtcgatggagaatcccgccgggtcggcgcgacgagcgagccaattgtaaagctcgtttgtccgcacaggaacgcgctttccattgcgtcgacacccatctggtccactcttcgtgtcgatcttgcgtgtcggatttgccacgagacggaatcgaagatgctgttccagtgagaaactgaaagcgggaaagttcacctctggaggagccgccagaagatgatcggcgttgcagaacgcgtagccccagttgggcttcgctgccgactgtacgagaatcacgaccccaccaccagccagagggtctatgcgatacaggaacccggcgtcgggacctcgagtaacgtgaacctgattggagccaaaatcttccggtttgaagggtttaagaaagtccgcgtcctcagatatcctggactcagatggaaaggccatgcacagacgctggtgaaccctgtatcgatttctcagccacagccgcccaggacgagggcggtcgggattgatacccacatttatgagcaacgtggagacgtacatcactccacctcctccggtttcaggcgtcgacgccgagtttcgagggagcgaaactcgatgatttcagctcgctttctgacaatttgctcgtgccagcatgaatcttcggggttgatccggtccaagcccatgcctaggccgtactcgatcatggtgaccgcatcgtggcacaatctgcagagcgaacgaaggtcttctcgctcttcattgccaccggcccttcggtacgtgacatgttgaaccgttgtagctggagccttgcaaaaaacgcacagctcgtggtcggcagtgagtcgggcgctgcgcgccttacgatactcgttgtttcgatagttcgctcgctgtctcgggggaggtggtgtcctatcctgagctgctgtttcagctacactgacctcacctgctgtgcctacacgtagtgccttgcggataacgaaccggggcctgtgtcccggcggttcgaacgtgagaggaacgtcataccagacgagggcatcattgggggcctcgggctgtgcaggcgtactctcccagtccagcaggcagtctacgatttgcggcgccgcctctctcttgaaccgcggacgccagggaatggatgtcagcgccgaatccaaatcagggtaagagccagccggatgctccagaagaggacgggagggcgggcaggcttttcttccgaggtatagcgtatatttgggctttcgtactgctgcatccaactcgtcgataaggcccggttcgccttgcagtgcaaccaaaaaggaagcgtcacacaggtactctcgtcgtgtgagcatcgcgccgggcttgctcttaccttggcctgcggcaatgcgcatttccatccctgctccgaccgtgtgatagtcccaccaacgcacacccggcgagtcgacgcgaacgcccatgcgcagggcgccgagccgcggaagccaaagctccgacgccttggaacgcgacagacccaaggccgcgcagagcattccgatcactcctgatttggtcggcgcttgagctgttcggcggacgacgaacttcgactcatgtgcgccccatgcctgcaagggaccctccaggcggagaatgagtgtatcggcgctcatgaggccaactcctggctaatgacgatcctctgaaccgagttccagtcatggtcgatggcagtaatcactgcggggatcaattcttccagcgatttgatgttattctcgctgaggaggatctcctgctcattttcgactacagtcaagcggtaacggagattaggcgagaaccataaccgtttccgcggcctgccgtatccagtgtccatgtcgtggatgtattgtcccaattgcgctatgctttgagagataatgtcacgctggccttgggctgccggtttagcgaaagcgttggcatagctgatgggcgcttccttaatttcaaccagcattccatcaggaggattgtgtgcggcgaagctgttttgttttcccgtgggattgaccaatgccacgccccgaatgaacgcgcccaccgtgtgggcggccaaatgttcggcgttgccctggaagccttggagattcttgacgagtgtctcccagtggatcgagaagtacttgtagaaacaggcagaagaaaacatggcttcgtctacatagcctgctcccgcatcgtcgccaggaatgtcgtctgcggcaacgtagtaatccacttccgggcgcgcctcatgggtggaaattgcatgagccacctgcaacgccgcttccacagtcgtgttttgcaggacgccggtttccagcattcttccactcagggccatgtccggtacggcagtccgttcagcgatcagtttcccaaattccgtcgcaagctcttcatctgtctttccgccgctctgcaaaagagtggccatttcgttgatcgcttcgcgagtcgtgtagaccagcatgtcgctcttgtcctcgtctcttggtttgatgccgcactctttgagaatctttgcagtgcgtttcttggc

SEQ ID NO: 925 - DNA, 3068 bp, Artificial Sequence
  Synthetic Oligonucleotide
ccacataataaaacgccgtatgccaaacagaacgccgccatcaagaatgaaatacgcagtagctgcatcaagataaaacacgccatgctttcttccaatcaaatcatacgcctttatcgcatctttcttcgtcggcggaaattcaatgccaatagattcagcaaaaggttttgtaatgccaaaataagtttcaccaccggttcaaccccacgcgcgtggggaagagccagccacgccccacacccctggtgtgacggtgggttcaaccccacgcgcgtggggaagaggctacaaatattttcagtatttgccatgataaaatcaatttaaaaggttattctattaatagcaacccgcacccgaaacctttcagaggtccgatgccgcaaactaaagcacttttaaaagataaaaaatcttttattattaaagaaccactataatttgcaaccgaaaatcttttttcttttacttttataaactttaaattgacgtcaacattttccgctatggctccgaaattttttaatttttcttcgagccaagggattaaattttcttttccaacaaaaactcttttcccgtttttggaacaagaatttttccaccatgcggcttcagtctcctgctcatttttataagtagtgaatatttttttcgtgggatttgcctctaaagtgaatttatatttctcattttcttttaaattttcaaaattaatttcataaatttcaggatctttttttataaaagaagaattttgaaaacaatattcccaattcggtttttggtgggattgaataattaatatattgggtgtaatatgtctaaacaaaaatccaccgatatttcttggtacattaaaattttcaaattctttttcattatatggttgtaaaaacagggggtcttgttccaacttatctttctttgggaaagccatgcacagtcgttggtggaccctatatctgtctctcaaccaaaatcttccgggggctggattatcaaaagatcctgtatcaacatgaatgattgatttatacataatattatctcctcattctcaatagttttttcttagcttccaaaataggatttctccatttgggatccataggatctacacgcccttttgtcattcccaaaccatattcaatcgtagtgcatgccttatggcaatgtctacatagagaccttaaatcttccagaagttcgtttccagaacctctgtatattacatgatggacttctgtggcaacgtccttacaaaatacacacaaatgattatcatattccaatcttaattttttcatttccttagatttttgtaaattttctgtttcatatttttcttttatttttttctcttcattttttggggaactataattttctttattaaatgatactttcataattattctaggtttgaataatcttttagagaaatctacgggaacatcattaactataaattcttttaaaaatattacatctggatcattttttaaatcttccatgaaatcaaaataaacatcagtttgagaaatattttgtttaacaacatcgataaaatttccttctaaaatttgcggaattattggaactgatatggaacaattttttcttcccatataaatgttccatctcggattttccaaatatttttttatagattctaaaaaattttcttctccgtgtataaatattttatattccggatcgaacgtgtactcaactcgtgaaacaaccgttgaatccttgctttttccatttgccataggtcttcttacatcaaatccgcatatcataaaatcaatagacttatttccatttttttctaatgaaactcccattttaagatcttggaaaggttttagaacttctttggttgcgttctctctatctattcccatggcgcaacaaagcattccaatgatcccggacttcgttggaaatgagtagctctttctgactacccagtgattcggttgaccccaaccagacatcaatcctctcaaatcaaattttagcgttttcattttttactctccaaatatgctacaaaagcatttttaaaatcttcatatttttcataaaaatcaccggaaacattcttttcaacatcttcaattgtaaaatagaatcttttttccggttcaaagaaagaattatctattttattcatataattatttaattttttaatagattctttaatcaggttattttgaccaagaggaactgggacaacaaaagcatcactataggacaaaggttgttttcgaatttcaactataatagcacttggaaccggattggaagcaaaacgattctgaaatccggtaggcacaacaaaagaaaatgcttgaagaaaattcttagttgtttctaaagctaaattttcatctttaagattttctattagtttgttccaagatatggaagcataaccatagtaacaagaggaattaaacatggtttgacctaagtggccgctgcccgtttcctcaaatgtttttgtcatatcatctacagcagtgaaaaaatctacttccagaacaacttcgtgcgtagagaagaaattgctaacttgagctgcagcttccacattaagattttttttcttcagttctcctccactaatttcaatcattctaccaaaaagagcaatttccggttctattcctttttctataatgcaagcaatttctttcacgcattcagacggattattatatttttctaaaatgcatttggatattagtggtataatacttttaggagtaaaaaacaagttattatttttcttattttcattttcttcttcttcattttccatattgtcttctacatcatcgatttctttattcttatttttattatttttctttttatttttttcttttgagaataattcatcgtagatttttttaattttttctttttctgtgaaaccattttcttccaattctttttcaatcatcatccaaaaatattttgttctcacagaattttggaaaaattgattccaaacccgcatatttcttttgatacactggctagaa

SEQ ID NO: 926 - DNA, 3068 bp, Artificial Sequence
  Synthetic Oligonucleotide
cgtggccgaggaagctcacggctcgagcccggctcccgacgacctcctgaagctggtggccgaggcgttcgagaagggcggagtcaaacgcgacgccacgcgcgaagacgccaacgcgaccaacatcctcatgttcgtgcccgagtcggcgatcgccgcgatggccgacgcggtccgcgaagccaaggcggccaagaagaagcccgacgaactctgcgaggcgttcgccgagatcctcggacgcaaggcctctgtgcccgacgtggcgctgagcgggcgcatgaccgaactggacggcgagggccttttccgcaaggttgacttccacgtcgaagccgccctctcggcggcccacgccatctcgacccatgaggtcatcaacgaggtggactacttcacggccgtcgacgaccgcgcttccgggaccggcgccgggcacgtgaatgaggccatgttcgcctcggcgtgcttctacaagtacttctccatccactgggagcgtctcgttgagaacctcgccggcgatgtcgaactcgcgcggctgacccttcgccgcttcctctccgcccttgcgctcaccacgcctaccggtaagcagaagagcttcgcggccttcaacccgcccgagggcgttctggtggaggtcaagaccgaccgctgcgtgcccgtcagttacgccaacgccttcgccgaccccgtcccactgagaggcccgcgccccctggtcgccgagagcgtcgcgcgtctcgggcagtacgtgcacgagacggtggacggctacggcctccgcgccgagcgcttctggttctcgcccggtgggcgatacgctctgacctacgtggatgacaagcaggagaggcccctcgttgaggacggcgcgttcgtcgcctctctggacgacctgatcggagccgtggacaaggtcgtcgcctcagcgcagggggcgtagccatgagcgacgctccgaacaccgtgtacctgcgcctggagggacccctccaagcttggggcgacaactcgaaactcatcgtccgtcgcacgatggacgcgccgaccaagtccggcgtcctcgtccttgtgtgctgcgcgatgggcctcacatggtctcaggcgcgcaagctcctgcccgacctcaaaggcctcgccttgggcgtccgcgtggaccggccaggcctccgctggtgggactaccacaccgtcggcgccggcatcggcatccgcacggccggaggcaaggtgaaggtcacctcgaagaccggcgacatcgagaccctcgtcagtcgcagggagtacctcagcgacgccagctttctcgctgctctacacggcggctcggatctcatcgaggaactcgccgacgctctcgcaagcccgcggtggcccgtcttcttgggtcgcaagtcgtgcccgcccgcgaggccggtcctcgagggtacggcgacgtgccctacgcttcgcgacgcgctcgaggccgtcgcctgggagccacgccaccagggagaggcccggggcgtcggcaagcgccggagccttccgtgcctgctcgaatggcgcgggtcccggtcggagcctgtcgccccgcccgaggcggaggtctggtacgaccggcccgtctccttcgagccgcccgtccacgagccgcgcctcgtgttgcgcgactcggttgaggccgcggtcggccaggcgctcctgacgcccgccaaggccccgccgcgcccgcgcgccgactacggcaacgagaggtacaagcagcagcggctgaagcggatcgccgcggacgagggcctctgcgtgctctgcaagtcgcccgcgacgaccgtgcagcacgtcacctaccgacgcgccggcggggacgaggacctcgccgacctccgcgccctctgccggctttgccacgacgcggtgaccatggtcgagtacggcctgaacatgggcctcgaccgcatcaaccccgaggacccgcgctggcgcgagcgtgtgctcgcgaagcgtcgcgagatcgtggacttccggtctctcgagtcgcgccgccgctccttgcgggcggggaggacgcgcgtcggcgcggaggtcgccgaggaggaggactagccatgtacctgtcccagcttctcatagacaccggcacggaccccgatcgcccgcgccccgggcgacgctggctccgcgatccctaccgcgtgcatcagcgtctgtgcatggccttcccctccgccggacggcgcgcgcgcgacccgcggttcctgttgccgttccggaccgacgacttccccgagcaggcgcgcgtggagcgcggtgaggaggccggcttcctcttcagggtggacccgcggagcgtcggccgggcgatcatccttgtgcagtccgctgcccagcccgactgggactacgccttccacaacgccgaccacttcctcgcggcccggcccgagacgcggccgtacgacccggggcccgaggtcgactggacgtatcgcttccgcctgcgcgcgaacccgacgcgacgccgcaaggacgacgggaagcgcgtggcctggctccgcgaggaggaccagcttgcgtggctcgaacgccaggcttccgacaagggcttcgcggtcgaggaggcgcgggtcacgactcaggggtggggccaggcgtcggcgggccggcccggggacaagccgcccatccgcctctactcggtgctcttcgaggggctgctccgcgtcaccgttgcggaccagttcgcggacgcgctcaggaagggcatcggtagcgcgaagggcctcggtttcggccttctctccgtcgcgcgggtggggtgaggcgtcatggatgacctgcacgcgctgccgaagttccgagacgggctgagctacctctacctggagcacgggcgcgtggatcaggaccagaagtccatctccgtccacgacgcgcagggcaaggtgctcgtgcccgtggcgacgctctgcgtgctgatgctcgggcccggcacccgcatcacgcatgccgccatccgcacccttgccgagaacaactgcctcgtgatctggtgcggcgaggagaacgtgcgcttctacgcc

SEQ ID NO: 927 - DNA, 3000 bp, Artificial Sequence
  Synthetic Oligonucleotide
gaatctcgagccagtgcctcaagcgcagcgtccggcgtagcgcggaatttgccgctgagttgaaggaggtgggcggcgtgcggaccaggaggctcattgaattaatcgccaaagaggcgggcggcgaaggtaatttactaaaggaggataccaaagcaattcgtactgcttttaaggatgggggagttccttttaaggatgacagcaccttcgatattctcttctttctcccctactccgccgtcaaaaagatgggcgaggccgtccgcaaccatagaagtgacagtaaggatctgggaagcgaatttgccaagatcatcggggagttcgtcaagacacccgacattgcactttgcggtcgtatgaccgaattcgatgccaaggggccgtttggcgaacttaagggaaggttcactgtcgaggccgcgctctccgctgctcacgctatctcgactcacgctatagtgaacgaggtggactatttcgtcgctgcagacgacgtacccggcccggatgcgggcgccgcacacattaacgaggccatgttcaactcggcctgcttttataagcacttcgtaatcgacttcgaccagttgaagagcaatctggccaacgatgccgacctcgccggtaagaccgttcggtgcttcctcaatgccgccgtcaaggccaacccgtccggcaaacagcatgcgtacgctgccttcaacccgcccgatggagtcctagtcgagatcaaaactgaagcagctaccccgatcagctacgccaacgccttcgccgatcctgtacccgagagggcccagcgtgggattgtcggtgaaagcatcgccagactcggccagtacgcacatgatctagctcatggctacggcatcccagcaaatcgcttttggttttcacccggccttcgccataacctcacttggatcgacagcggcgagaccgacagcgccgaacaggttaagcccgtggtcggtcccgaggggcagttcgccattttcgataaattcctgaccgcggtcatggaaaatgtaatggcgagggacacacctgttgcggtggtcaagtgaccgaagtcaacagcatattcctccgccttgagggcccgctgcaggcttggggcgatccgtccaagtttgtcgtccgccggacgatgaatgcgccgaccaagtcaggcgtcctaggcctcctgtgctgtgcgctgggatactcccgccaaaccgcacgggaacacctgcccgaactcaatagcctttccatgggtgttcgcgtcgaccgccgtggcatccggtggtgggattaccataccgtgggggcaagaaccggcatgactaccgccgcaggcgatgtgaagacggacgcgcagggcacgcttgttacgcgtcgggagtacctggctgacgccagctttctcgtcgtgcttcagggcgatggacagttgattcataaactcgcttccgcgctcgcgtctccgcaatggccagtttttctcggccgcaggtgctgcccaccgtctgtgcccgtgctggccaagcctcaagaaggtgagggctggacgaatccagcccgccacgaaagcctaaagtccgcgctcgacgttatcccatggcgtccacgctataagcatgatgcaaggccaccagcgggaacagtggaatcgctcgtggaatggaagcccagttcggaaaatgacatcgctccggaagatgccgaggtctggtacgatgcgccggtctgcttcgatccgccagtccacgagccacgtttagtccttcgcggcgtcgcgtcgccgaccctcggtccggcaacgcagactcctgtccccgccgccccgcgtgcgcgtgcggactacaagaacactgattataggaatcgccgcagcgagcgccttaaccaggatcaccatctctgcgtcttttgcaagtccccagccacaactgtccagcatgtcacctatcgccgcgcgggcggggacgaaaccctcgacgatctccgcgccctctgccgcctctgccatgatgccgtcaccatgattgaatacggccataacatggggcttgaccggattgatccggtcgacagacgctggcgcgatcaaattcgcaataaacgtctcgagatcattcagtaccgttccctcgaaacccgcaggcgctcgctccagggcgtaaccgacgagtagaaccgactatcatgtacctctcctgtctgcttatcaacactggtagtgatcccgaccgcgagcgcccggctcgcaactggcttcgcaacctctaccgcgtccaccagcgactctccatggcattcccgtccagcgagtacaaagctgtcgacccgctcttcgtccagccctacgaccccactaagttcagccagaaccttgatagcggccaaaaacgctccaccgacggcggcttcctctttcgtgttgaccaccgttccaatggcccgaccgtgattctcgttcagtccgctatcattcctgattgggactacgcattccagtcacttaaccacccagacaagcctgaaacctctttctttgctgccccgccgcaagtgaggccctttgaaactcaattcaaacagggtagccaactccggttccgtctccttgccaacccgactaagaaagtcgatgccgctgacaaatcgctccggaccgatcccacccgcaccgcacccttaaccagaaaacaactcgacggccgccgggtgcccgttcccgacgacaaacttgtgtcatggctcgaacgccgcgccgccgcctccggtttccaggtgcgccggatcgactccttggtccctgggtacatccttgcccttaataacaaggaaaatggcgccggcgctcggtttcgctccgccttgtatgacggtgtcctctcggtcgacgaccccacagccttccggcaagccgtcattcagggcatcggtcccgccaaagcttttggttttggtctcctgtccgtcgccgtaattccatgaggctgaaat

SEQ ID NO: 928 - DNA, 3051 bp, Artificial Sequence
  Synthetic Oligonucleotide
tagccccaatcgggcatttgatgggaaagaaccaaaatcatcgcccgtccattgggcaccgggtccacgcggaaaagaaagcctgcgccgctactgcgcggggtgtggacctgcgccaagacgtcgggatcaaccgcagtgttgagttgttccggcaggcggcacagcgaggcggccaactggcgttgttcggggaagtcgtcagcagcataagggacaaggaattgaggatcccggtctcttcgtcggtcggacggaaaagccatagccaaccgttggtggacgcggtagcggttgcgcagccacagccgtgcggggcgcgggcggtcggggttctcacccacgtcaatcaagaggcaggacagatacatattcattccacctcctctgcggcgagacgccggcggcgcgtttccagcgaccggaactcgatgatctcagcacgcttcttgatgatctgctcgcgccatcgttcttcttcggggttgatgcggtcgagacccatgcccaacccgtactcgatcatcgtcacggcgtcgtggcagaggcggcagagggagcgaagctcgtcgatgcgttcgtccccgccggcatggcggtaggtgacatgctgaacggtcgtggccggagacttgcagaagacgcagaggtgatggtcgctatcgagccgctgtttccgacgttttccgtactcagtgtttccatagtcggcgcggggacgcgtcggccgtggagtggcattctgtgcgggctttgccgagatactgacctcgccgtccgcgccgacgcgcaattgcttgcggatgacaaagcgggcttgatgcgccggcggctggaacgtcagcggcacgtcgtaccagacgagcgcatcgtcgggcgcttcgggctggtcaggcgttggctcccagtcgaggaggcagtcgactgtctgcggtggtcgctctttcttgagccgtgctcgccaagggaccgatgcaagcgccgcaagcaaagtgccatgggcatcttgcccatgaatcacgggctggaagcccgtgccacactccagcagcgggcgggacggagggcagcatttccttcccaagtagagcgtccacttgggagctttgactgcggcctccagttgggcaatgagagccggttcgccctgcaaggcgacgagaaaggaagcatcgcataggtattcgcgccgggtcagcatcgcgccaggcttggtctttccctcggctttggcgatgcgcatctgcattccggcaccgaccgtgtgatagtcccaccagcggacacccggcgcgtcaatgcggacgcccatgcgaagagcgctgagcttcggtagccactcctcgggagccttgggtcgagagacccccaatgccgcgcagagcatcccgatcactcccgatttggtcggggcctcggccgtccgccggatgacgaacttcgattcctgatcgccccatgactgcaaggggccttcaaggcggaggaagagggtgttggcgctcacgacgccacctctggattcacaatgactttccgaaccgcgtcccagccatacccgatggcggtgatgacggtggggactaactcatccagcgacttgatgttgttctgggcaagtgcgatctccttcttatcctctaagacgctcaaggggtaacgcagattgggggagaaccagaaccggtcttgcggcttgccgtatcccctatcgagatcgtggatgtattggcccaattgcgcgatgctctgcgagatgatgtcccgctggccttgggctaccggctgggcgaaagcgttggcgtagctgatgggggtgtccttgatctcgatcagcattccatccggaggattgtgtgcagcgaaactgttctgcttacccgtaggattgaccagcgccgcaccgcgaatgaacgcgccgaccgtgtgcgctgccaattccttgtcgtccttcaggttttcgaccagcgtttcccagtgtatcgagaagtacttgtagaagcaggcagaggcgaacatggcttcaccgatatgagcgccaccggcgtcctggcctttgatatcgtcagcagccacaaagtagtccacctccgggcgggcctcgtgcgtcgagatcgcgtgagcgacctggagagccgcctcgatcgtcaaatcaagccctttccatacacccttgttcttgcccttatcctctgcgtcctcttcatcgtcttgtaattcgttcgtatcgtccgctttgcctttcttgccctttttggggggcttggctggctccagcatgcgccccgaaagcgccatatctggtgcgtagcgatcctttgctatcagttccgcgaactgacgagcaagttcttccacttctttcgccgtcggtttcgccggtccactgcggagtaaatccagcatgcgggtaaccgcacttttcgacagaaaagcgatgacatctttcttacccttcttgccttgttcttcgctgtgcagcaatccgcacttctgtaccacagccgtggccagcgggaggacatccttttctttgatctgttcggcaagatgctgtggcaatctccgggtacgaatgccgccacatagcagcttgaattggtcgctcatccggatgcttcgcttgatgcactggctggagatgcgtgagcgcaggaccccgccgaaatagcaagtcttgggcgcacccaggtcgtcccggttcagattggccgggctgtggttttgaatgatgtgaatctcgatcaacattattttctcctttcatcggttcccaagaattgctccgcccactttatgcgggtgaattcacgttcccaagagccaagatccttcgccagtcttacccagtcgagtttcccgccttttgaggccaccaagtcaagcgcccattgcagggcaggttcgattctgccgagcggcaggctcagcatcgtgtcgaacctttgcgcgaaacgccctttctccgggtccttgtcgggctggcacaatcgcagttggcgagcgagagtctcgccgggggactgcgaaatcggacagaaggcgtagagc

SEQ ID NO: 929 - DNA, 3039 bp, Artificial Sequence
  Synthetic Oligonucleotide
acaatggccgcatggcagattccgtagaggcaggaattggcggcggacaaggcccgattggcggggtccgcgttgctccactcctcgcgtttatagcttcggcccgaccacgtgatggcggcttcctgcgcggctttggcgtatgcctcgcgaacccttacgccctccatgccgcggatctgctggaggctcaaggcggggtcgaacttctcggaaaagcgcatctgatagaggcggcgcactacttgcatgtggaaccccgcatgcgcccacactcgcgcctgatgcaggaaattggccgcgttgcgcgtctcgcccattcccgtggcgtaaaagcggactccttcctctccacaccaggcgaccaggcagccatggtcggcgagtacggagatggccgcatgggtgatggagacgcccggccctaacatgagcaaagccagattcgcgcaaggcaccggtgtcttcccggcctcgtcgtggaaagcaatggcgcggtcctcctggtccacgcgacagtgctcgacgtagagatagctccacccgtcgctgaacttcggtagtacgtggagatcctgaattctcacggggcctccgctgcgagcggcgcgtggcagggggctacggaaagcaggccgaaaccgaaggccttgccgggaccgataccgtgcatccaagcatcacggaagcgcgcggggtcggtgacgctgagaatcccgtcgtagcgagcggaccgcagacgaaccccatctccgttgcgcgccttgttgacatagacataacttggcgaaacggttgtgcaatcactctcaacagagaacccagccctttcagcccggcgagtgagccagtcgagaagatgctctgtcggtacggggacacgcgtgccaatccccttctcgattggacgtccgtccgctccgagggaacgcttcgagaggcgccgggtcggattcgcagcgaggcggaaccgaagatgccgcccgacgtcgaaggacggggcgaacggtttcacctcgggaggagccgcgagaagatatccggcgttgtgaaaggcgtaaccccaatcgggctcgacggccgactgcacaagaatcacgatacggccgccgggctgcgggtcgatgcggaaaagaaagccggagtctgaatcacgcgggctgtgcacctgcttcaggaggtctgggtcggcttccgtcttcttcctgtcggccaagtgccgttgctcggggaaatcgtctggcgcataaggcgcgaggaattccggatcgcgctttcttcttggatcagaagggaatgccatgcaaagccgctggtggacgtggtagaggtttctaagccatagccgtccggggcggggacggtcggggttgtcgcctacgtcgattaaaagacaggacagatacatggctattccacctcccgggcgaactcgccggtcaggcgccggcggcgggttccgcgcgaccgaaacttgataatctccgctcgcttctcgtcgatcacattgtgccaacgcggctcttcgggattgatgcggtccaggcccatgcccaatccgtattcgatcatggtcacagcgtcgtggcagtaacgacaaagcgaacgtaactcgtcgatgtgttcgccgccgccagcgtggcgatacgtaacgtgctgcacagtagtggcgggagctttgcagaagacgcagaggtgataatcgtcgtggagccgctgctgccgccgctctctgtactcggtgttgccgtaatccgctctgggacggggaggcgctggcgtctcgtgctgcgtgggctcgccggcttccacgtcacagccaggcccaacgctcagttgtctgcgaataacgaatcgcggctggtgggagggcgggtcgaatgaaaccggcacatcgtaccagacaagcgcatcatcaggagcctccggctgctcttgtgttggccgccagtcaatgaggcagtctacgctttctggctgtcgatctccttccagccgcttgcgccaggacacggacttaagcgctagaagtaaatcagggaattcgcccggaggatgctccagcaacgggcgggaaggagggcagcactttctgcccaggtaaagcgtccatttgggcgctctaattgctgcttccagttgctcgatcagctcgtgttcaccctggagggcgacgagaaacgaggcgtcgcaaagatactcgcggcgggtaatgagagtttcaatttcatgggtggaagctgtccgtttaattttgccttctgcggtaagcaggcccaccttggcgccaacggtgtgataatcccaccagcggaccccggggcggtcgatgcggacgcccatggcgagaccggcaagcctcggaagccagcctttcggggcttctcggcgcgagatgcccagggcagcgcagagcatcccgatgacgccggatttggtcggagcatgagccgtccgccgaatcacgaatttggattgctggtcgccccacgcctgaagtgggccttcgagacgcagaaagagggtgttggcgctcatcaggccacctccgcgatcacaactgccttctgaacctcctcccagttgtagccgattcccctgactactgcccggataagttcgtcgagcgacttgatgttttcatcggcaagggctgtttcacgaactgtctctttctcgccctccttcaccttctcgtgaaccaccaggggataacggagattgggcgagaaccagaaccgtttgacaggcgccccgtagccgttgtcgatatcgcggacgtactggccgagctgcgcgatgctctgcgatatgatgtcccgctggtcattcgtcgctggcttggcaaaagcgttggcgtagctgatgggggtgtccctgatttcaaccaacattccgtcggggggattatgcgcggcgaagctgttctgcttccccgtgggatttgacaaggcggcgccgcgcatgaaggcgcccaccgtatgggcggagagctgatcattgccgttgagattctttttcagggtctcgaagtcaatc

SEQ ID NO: 930 - DNA, 3015 bp, Artificial Sequence
  Synthetic Oligonucleotide
aaccgtgttcaacgcccttgcgcgcgagccacgcccgttgctcttcctctcgatgcagaccaaagcgccgcttgttggccggcgcagtcccgtccttccgggccaccgcccgcttcgcggcaacgttggccctgaggaagaaccgataccgccgcccgcaggcaggatcggggttgaactccttgacctgtggttcggcgcggagcagatgaagagcacttgcgaaggccttccgccagtccggcgcctcggcggactgaacgaggatgcgcggctggccggggaagtcgccctcgatgcggaacaggacgccggcgcgttcatcgcgagcggcatgcgccgcgcccccttccccgacgtgcggaatgtccggaaaggccatacagaggcgctggtggactcggtagggattggcgatccaaccgcgtccgggacggggccggtcggggtttgcgccgacgtcaaccaggagaagagagaggtacatggcgtcacacctcctcgggctgcaagcgccgccgacgcgcggccagcgaccggaagcggacgatctcatcgcgctttcggacaatcgcgtcgcgccatcggggctcttcggggttgatgcgatccagacccatgccgagtccgtactcgatcatggtgacggcgtcatggcagagacgacagagcgaacgaaggtcatcgaggcgttcgtccccacccgcacgccgataggtgatgtgctgaacggtagcgttagccccttccacgggcgaccggcagaatacacagcaatgcccgtcgcgcacgaggcgctcggcgcgacggttgcggtactccgtgtgtcggtagttcgcccgaggatacgcgggcggggccgcccggcccgtcccagcggccggcatcacgacaacgccccccgcaccgacgcggagttcctgccggatgacgaagcgcggctcgtgcgcgggagggtccaaggatacgggcacgtcgtagaacacctgcgcgtccgggggagcgaccgaccccgaaaccccgggccgccactcgatcaggcaccgaagcgtctcgggtatgtcgtcccccttcagccgttgccgccacggcacgaagccaagcgcgtccaccacgtcggcgaactcgcccggaggcgtatcgagcaacggacgcgccgggggacaggacttccggcccaggtacaccgtccactgcggtttccgaagcgcctcgcagagcgcttgaacgagggccggttctccttgcaggacgacaagaaaactggcatcgcaaagatactcgcgccgtgtcaagagcgcgcccggctttgtccggccctcgccttcggcgatgcgcatctccatcccggcccccaccgtgtggtaatcccaccaatgcacgccgggcatgtccacccgaacgcccatgcgcatggccgccaacctcgaaagccacacgtcgggcgcttcggcccgcgaaacgcccaacgccgcgcagagcattccaataacgcccgacttcgtcggcgcctccgccgtacggcgcacgacgaacttcgagtcctggagtccccacgcctgcatcgggccctccaggcgaagaaagagggtgttggcattcatgcggccgcctccggattgacgatagccttctgcacctgttcccagtcgtgaccgagagcgccaatgacgcccgagacgagttcatccagactcctgcagttgacgtcggccaggggcgcctcgcccttgtcctgctggacgaccagacggtgccgcaggttgggggagaaccagaagcggcgctgcggccgcccgaaaccgacatcgaggtcgttgacgtatgcggccaactgcgcgatgctctccgcgatgatgtcgcggtcaccggcggccacgggacgaacgaaggcgttcgcgtagctgaccgggcatgacttgatttcgaccagcatgccttccggaagattgtgggcggcgcaactgttctgcttgcccgtcgggttcgtcaacgccgcaccgcgaagaaacgcgcccaccgtgtgcgccgccagcgcgtcgttggaccgaaggttcgcaagcagttgctcccagtgaatcgagaagtacttgtagaaacacgcggaggcgaacattgcctcgtccacgtacccggccccggcgtcttcgcccggtacgtcgtcggcggccacgtagtagtccacttccggacgggcttcatgggtcgagagcgcgtgcgcaacctgcagtgcggcctcgacggtcgtatcggtcagcacgccggtttccagcatccgcccgctgagcgccatgtccggcgcgcacgtgcgcgacgcaatcagcttgccgaactccttggccagatcgtcctcggactgtgtgatgcctgtcttgagcagcgcggccatctcgcgcaccgcttcgcgggtggtataaaccagcatcttgctcttgtccgactcggcggcgtcctcggcgtcgcgcttcttgcccttcttcggttccagaccgcaaatgcccagaatcttctcggcgcgcttctgcgcgtccttcaggtcgggacactcgcgcgcgatgagcacggccaactggcgggtgcggatgcctccgagcagcctcgcgaactgcggactcatgcggatgctgcgcttgaggcactgactcgaaatcctcgaacgcagaacgcctccgaagtagcaggtcttcggcgcgcccaggtcgtcacgattcaggttggccgggctgtggttctgaacggcatgaatctcgatcaacatgactcttccctttcctcaataccggtgaactgcttcacccacaccatgcgggtttcctcacgattccagcgggagaggtcatccgtcagcctcacccagtcgagcccacggcttccgggggccactcggtccagagccaggcgcagcgcaggctccatcttcctgaccggcaacgccacgagcgcgtcgaagcgttgcacataccgcttgcgttcgggatctcgcgccgggcaacggacgcgcatcagccgcgccag

SEQ ID NO: 931 - DNA, 3009 bp, Artificial Sequence
  Synthetic Oligonucleotide
  misc_feature (881)..(890): n is a, c, g, or t
ttttctcgctttccactccacgccataggtgcgggacgcatcggcatatgtctttcgaacgcgcaacccctccattccccgaatgctctccagactgacaacttccggtatggtttcgttgaagcgaaagcggtacatacgccaggcaacgtggaggcgcgactcttcgttgctcaccaactcggcctgccggatgaggcggcgggcgctgtacgtgcctcccgtgctcgccgcatagagacgtacgccgtcctgaccggtccacgccaggaggcagttgtttctggacagagcggccaccgccgggtgcgtcacggttgtccccggtccgagcatgaccacggcgagttggtcgatggggaccggcgtgacgttctcgctctgtcggaagcagagcccgagagagtcgacatcaagtcgccccatttccaggtacaggtagctccaccggtcctggaagcgaggcaactcgaagagcgtcctcatgatgactatctcctgaacggtgcgaccgagaggagaccgaagccgaatgccttgccgctgccgatgccggcgatgattgttttccggaaggcatcagggtctgtcactcgcagaaccccgtcgtaccggatggcaagatgtgacatgggttcggcgtcatctcccggatgcccgcgaaaggctcgtttgaagctctcgtcggtgatggtgactgagagcacctcgaagcctccttcccgccccttcctttcgagccacttccgctgcttgtcctccgtcagcactccctcgcgcttcttcgtgtgattgtctcgccttgtcgggttggcgcggaggcggaagacaagcgtctgtccggaggcgtagcagtactcgcctggcttcacatccggcgnnnnnnnnnnggtccagtcgggacagggtgccgattgcacgacaaccatcgccctccctccgggtagggggtcgaccctgtacaagaacgcgtgctccgcagtccgggtcttctcgtggacgccgtggaaacgcgcgggctcatacggcttcaggaattcggggtctgcagccttgctcgcttcctccgggaagcccatgcacaggcgttggtgaatgcggtagggctggcgtagccaggtgcggccgggacgtggtctgtcagggttggtgccggtgtcgatgaggagacatgacaggtacatcgctactccacctcctccggggacagccgccgacgtctgatctccaacgaccgatactcgataatctgctgcctcttctcgatgatggctgggcgccattggatgtcctcgggattgatccggtccagtcccatgccatggccatactcgatcatcgtgatggcgtcgtggcagcgtcggcacaaggagcgcaagtcctccaccgcttcgttgcctccggcgcggcgataggtgatgtggtgtactgggactgctggggccttgcagaagacacagaggcctgcatcgaaatcgagcctagctgtgcgcttcttcgcgtattcacgatccttgtagtcagcacgtgggcgtggagctaccggtgcgccggaaagagtcgcttcgccgattgtcactggcagcatgatgcgaaggacaagacgtggctggtgcaccggtggacagaacgagatgggactgtcataccagacctctgcttctggcggagcctttgtgttttcggctgatggggtccactccacgatacatgagacaccactagctggtggtttcgagtcaatgccgtgactgcgggaattccagggcactgcgccgagggctgacgggagatcgtcgtactctccagggtttgtccagtgctcgccggggagcggcgttgcgaggagaggtacggcgggcggacagcatttgcgacccaggaagacgggccaggtcgggtgctccacgacccgccggagggtgtcaatgacctgtggctcgccctggagagctacgaggaagctggcgtccgccaggtattcccggcgtgagatcagtgtctccaactccccggtgctggcagttgtcttgacgctcccatcggcggccagaacgccactgccggccccgatggtatggtagtcccaccatctctcgccagagcggtcgatgcgcacagccattcggagacggcgcagcgccgacagagtgtcttgtgcctcatgccgcgttagtcccattgcacagcagaggagcccgatgactccggatttcgtgggggcgtccgacgttcgtcgaatgaccagtctcgagttgcctccccaggattggagggggccctccagtctgagaaacagcgtgttcatggcagttgccactttcaccctccgggtttttcctcgttcttcaggtccgaccacctcagtccggggacgacgcacgcgacgactccctcgaccagcccatcaagcgtgtcgaatcgatgctctgtcaggagtttcgcttcgagccgtttgccatcggcgcgtcgctcccagtattgcagtggatagcgccacagcttcgggctgtaccacaccatagtggagtcggtgtcgtaggcctgtcgtctcgagtgcgcgtggtcagctagacaagcgatgctgcgtccctcaagactctgttcgtccggggcgtcgtcgctcggtttgcctgtgcgttcaaccggatcagcgaacgcgttcgcgtagaccgtcgggactgctctgttgcgcttgatctcggcaagaatgccacatggctcgcagtgagatgcgaagctgttctgctttccggagggtgttgtgagtgcggctgcccttatgaagtgcccgaggatgcgtgcggcgaagcgtttggtcccgtcatcgggtgcctgctcgccactgaggttcttcatcaactggtcccagtccagactgaagtacttgtagaagcaggcggagttgaacatcccctcgtccacgtgaccagcgccaccacccgaccgcccaaggtcatccactgccgtgaagtagtccacctcgttgactactgcgtgagtggagat

SEQ ID NO: 932 - DNA, 2969 bp, Artificial Sequence
  Synthetic Oligonucleotide
cggcgcatttcttcgtggggcggcaacggtcaatcccacaggcaagcagaacagctttgccgcacacaatccgcccgatgggattcttatcgagatcaggaacactccggtcagctatgccaatgccttcgccaaaccggcggctcatggcgagcgtgacctcatctcgcagagcatcgcacagttggctcaatacgtccacgatctggacagcggatacggtgcgccggagcaggagaagtgcttctggttctcgcccaatctccgctaccccttgacggttgttgaggacaagaaggaaatcacactcaccaagaacaatatcaagtcgctggacgaattgatcaccgccgtggtcgcagccatcggccatgactggaaggctgttcagaaggtcgtggtgaattcagaggtggccccatgaatgccaacaccctctttcttcgtctggaaggatctttgcaggcgtggggtgttcaggagtccaagttcgtcatccgacgcacggccgaggccccgaccaagtcgggggtgatcgggatgctgtgtgcggcgttgggcgtttcccgtcccgatgccgctggtgagtggcttccgagactcgccgatttacacatgggcgtccgtatcgacgcgtcgggtgtccgctggtgggattatcacacggtcggggccgggatgcagatgcgcagggccgacggtggacataaggaaggcgcaatgctcacgcgacgagagtacttgtgcgatgcctctttcctcgtcgccctgcaaggcgacccgctgctgattgccgaattgacgggtgccatgcaaaccccgaaatggacgctctacctgggacgtaagtcctgcccaccgtcccggccgttgatggaacatcctcccggcgttttccccgatctgctgcccgcgctgacatccatcccttggcggcgacggcttgaagctgacccatcgcccgaaaccgtggattgtctgctcgattgggaatcgtcggacgaacagccggaagcgccggatgatgcgctcgtctggtacgacgtgccgctgacgtttgagccgcccgcgcattgccctcggttcgttatccgccagacattatgcgtagggcctgaaggcgaggttcacgtcgctgaagaacccgcgcaaagcccaaccccacgaccgcttcgtccgcgagcggactacggcaacagcgcatacaagaagaggcgacaagagcgcctcgaccgtgacactcacctgtgcgtcttctgcaagtcgcccgcaacaaccgtccaacatgtcacctatcagcgtgccggcggagatgaaacgcaggaagacttgcgttcactttgccgcctgtgccatgacgccgtaacgatgctcgaatacggcttgggcatggaccttgaccgcatcaaccccgaagaccagcggtggcgcgagaagatcatccagaagcgagacgagatcatcaggttccgctcgctggaaacgcgccggcgcagactcgccggcgaggaggtggaatgatgtatctatcgcatctcatgatcgatgtcggcggcaacccggatcggccccgacccggcagaaagtggctgcgcaatgtctaccacgttcaccagcggctctcgatggcctttccatcgcccgtgcaatgcgccaaagacccgcgcttcctgctccccttcgatccggccggcttcgagcgtccgcgtttcctctttcgcgtggacaacagtatcgaggatgattgcccgcgtgccatcatccttgtgcaatccgagtggaggccggattgggactatgcctttcacaacgcgcgcatgtttcttgctgccgagccggagatgcgggaatacaatccaacattccaagtcggagaacaattccggtttcgcattcgcgtcaacctggcaaaaaagagcaggaatgagaaaagccaagacggcgaaatcgctcttcgcaagcagcgcgaggggttggatgcgaaaggtcgtcgaaaggatcagggcaagcgcgtggcgatgacttgggagaaggatcagggacccgatgcggcggcccaggaatggtttacctccaaagctgagcggtgcggcttctcaccacgtgacttccacatgttgcatctgggatggatcgccggttaccggccggagaaaagcaaagcgtcacgcgaaacgcaacaggagggcgaacatggtgctcgccagatgaaattccgatccgccctgctggagggaacgcttgcggtcaccgatgctccggcgtttgcccaggccgttgcctcgggtattggatcggccaaggcgtttggtttcgggctattgtccatcgcgccggtccatcgataacgagaaacaaggggattcgccatgcgactgcaagaccttcacgatctgcccaaggttcgcgacagcgtgggctatctctacgtcgaacactgccgcatcgaccagcacgacaaggccatcgccgtacacgatgaacacggtgtgacgccggtcccttgcgcctcgctgatgctgctgatgctgggaccgggcgtgaagatcacccacgccgcgatcctgacgctggccgacaacgattgcctcgtcgtctggtgcggcgagcagggggttcgtttctacgccgccggcttgggggccacgcgcggcgcagcgcgtctcctgcggcaagcgacgctggccacccgccgctccacacgcctgacggtcgtccggcggctctacgagatgcgtttcgccgagcggctcgttcccgaattgacattgaaacagattcgaggcatggaggggatgcgcgtacgcaaggcctacagcgccgcctcggccgcctccggcgttccgtggaccgcccgcagctatgatcgcgactcgtgggcctcggccgatccggtcaaccgcgccctatcctcggccaactcgtgcctttatgggttgtgccacgccgccatcgtcgccgccggttac

SEQ ID NO: 933 - DNA, 2829 bp, Artificial Sequence
  Synthetic Oligonucleotide
aggcttggtgggtgaggccatgtttggcgccgcctgcttctacaaatatttctcgattgattttgacaccctgaagaagaatctaaaaggcgacggaaggctcgccgctcacaccgtgggagcatttctgcgcagcgccgctatggcaaaccccaccggcaagcaaaacagcttcgccgcccataatccccctgacggaattctggttgagatccgcagcacccccctcagttacgccaatgcttttgcgaagccagccacgaacgagcagcgggacatcatttcccagagcatcgcgcagctcgcgcaatacgtccacgacatccaaaccggctacggcgctcccacggcacgcttctggttttcgcccaatctccgttaccggctggtggttgtcgatggcaacgaggaaaagccgctcgcggagaacaatatcaagtccctcgacgatttgacccgggctttggtggaagcaaccggccacaattgggaggacgtcaagaaggtcgtcgtcaacgcggaggtggcccgatgagcgccaacaccttgtttctccgcctcgaaggcccccttcaagcatggggcgatcagcagtcgaaattcgtcatcaggcgaacggcggaggcaccgactaagtcgggcgtcatcgggatgctctgcgcagccttgggcgtgccccggtcggaggccgcccaaaactggcttgccaggcttggcgcactccgcatgggcgtgcgtacggatgtgcccggcgtccgctggtgggactatcacaccgtgggcgcggacttactcatgcgcaccgccgaaggcagcagcaagcccggagccatgctcacccgccgagaatacctgtgtgacgcctccttccttgtcgcccttcagggcgaacctgaactgattgcggagttggaagccgcaatcaaggcgcccaggtggacgctttatctcggccgaaagtgctgccctccttcccgaccgctgctggaggaacctcccacgggcgagctggcagacttgcttaaggccctcaagtcggtgccctggcggaaaagagcagaaggcgagcagccgcccccgacggtggattgcctgctcgactgggagcccacctcagagcagcccgaggctccggaccatgccctggtttggttcgatctgccgctgacctttgaccctccctcccaccaagcccgatttgtcattaggcaaacattgcgcgtgggcgaggggggcgagatatcggttccttttgcgcccgtacagaaccgcacgccggcgccaccacgcccgcgcgcggattacaccaacaccgcgtacgaaaaccggcgcaaagagcgccttgccagcgactatcacctctgtgttttctgcaagtctccggccaccaccgtccagcacatcacctatcggcgcgcgggtggcggcgagcgtaaggacgatttgcgctctctttgccgcctctgccacgacgccgtcaccatgatcgaatacggcctgggcatgggtttggatcgcatcaaccccgaagacccgcaatggcgcgacaggatcatccagaagcgcaatgagatcatccaatttcgttcgcttgaaacccgccgcaggcatctggtggccgaggaggtggaatagccatgcacatatcccgcctcctgattgacgtgggcacgaatcccgaccgccctcgccccggccgcctttggctacggaatctttatcgcgttcatcagcgcctttgcatggcgtttccttccgatcccaagagcgacccgcattttctcaaaccgttcaagccggaaaaaatcgacgccaagcatgttcatgtgaagcggagcgggaattccgggttcctctttcgcatcgacccccaaaggggtggccgcgtggtcattctggtgcaatcggcgaaagagccggactggaattatgcattccagaacgccggatatcttctggccgctcgccccgaagtgaagctattcgacccacagtttgccaccgggcagcgtttgcgcttccgcttggcagcaaatcccacccgacgcctctgccggcattcgcgcgagcgtgacggcaagcctgtggccgaaaaatgggtcggcaagcgcgtcccggtgccctacgaccaacttgtggactggctggcggagtggcgcgcccacccggatgagccccccggcttccgcatcgacaaggactcaacgacgattcatggggcatacatttacgtgaacaaggcagcgaacggtagcgggaatcgcctgcgctccgtccgctatgacggtgtgttggaggttacggatcccgagagattccgtgccaccctttttcacggcatcgggccgggcaaggcctttggtttcggcctgctttcggtggcgccctgcgcagccgcgatgtagcggcggtcggagaccgacgctgcaaatttcgtcgatcgcagctcgacgcaacgatatgaaatataaacctcgcttacggcgattggaccggctttatactgacgcccctatctatttcctgacgctttgcacccacgagcgcaaacgggctttggcaaacctaccgattcatgaggaattcacccgattctgtcttcgggctaccgattttcgagtttgggtggggtatttcatgatcatgcccgaccaccttcacttttttgccgccctctgccgcgagtctccccccttggagaaatggatcaaagcgctgcgcggggatttgtccaaggtccttcgcggggatgagggcgagggcacgcactggcaaaaagattttttcgaccacgtcatgagatcgtcggaatcgtatcgacagaaattg

SEQ ID NO: 934 - DNA, 2753 bp, Artificial Sequence
  Synthetic Oligonucleotide
tttgtcgagaattggcttgcgttttgcggggggggtatactctctgttcgtcgtcaggctcatcgggagcctgaccggccacgaggccgtgaacggctaccaagcggagcattcggaccagcgaacagttcaagctgttgtgtggcggtatccgcacgcggcaactcgccaagctgatcgcggagcaggtgactggcaaggcggatgtgaagaaacgggccgtgaagatactggagaaatgcgggatcaaggcgaaggacgacgacaagagcgattcgctcgtctacacgacgcaggatgccattgggaagatcgcacaattgctccaggagaacgatggtgaaaccgacgaacttgccgagaaatgcgggaagctcatctccagccttgtcgcggttccggacatggcgctggccggcaggatgctggaaacgggcgtgctgacagataccacagtggaagcatcgctccaggtggctcatgcgatctcaacgcacgaagcccgccccgaggtggactattacgttgcggcggacgacatccccggcgacgacgccggtgcgggcttcgtcggtgaagccatgttcgcatcggcctgcttctacaaatacttctccatccactgggaaacattgctcaggaatctcgaaggcttcgatggcatcaaagagtttctggccgcccacaccgtcggcgcgttcctgcgcggtgcggcgctggccaatccgacgggcaagcagaacagcttcgccgcccacaacccgcccgatggcattgttgtggaagtgaagaaagaccgctgcactccgatccgttacgcgaacgccttcgcttcaccggtgccgatgaagggaccgcgcgacatggtgtcgcaaagcatcgcccaactgggccagtacatccacgatctggacgccggctacggcaaagcagacaaccacgagcgattctggttctcgccgaatctccactacccgcttacgttccaggaagacaagaaggaacatgcgtgcgcggatcagaatctcaaatccctcgacgatctggttacgcgtgtcgtcaaggcgattggttttgactgggaaaaggttcagacggtcacggtgaagtagggaggtgcggccatgagcgaaaacacgctcctgcttcggctggaaggtccgctgcaatcgtggggcgaccaggagtcgaagttcgtcgtccgaagaaccggccaggctccgaccaagtcgggaatcatggggctgctttgcgcagcaatgggtgtttcgcgggccgacgcgcggcagcgactcgtccaactcaacgatctccggatgggcgtccgcatcgaccgtccgggtgtccgctggtgggactaccataccgtcggcgcgggaatgcagatgcggattgccaaaggcgaaggcgaagtcaagccaggcgcgatgctgacccggcgggaatacctctgcgatgccagtttcctcgttgcgatgcaaggcgactgcgaactgatcggccaactgcgtgttgcattgctccatccggtctggcccgtctatctgggccggaaatcgtgtcctgcgtcccttccgctgctgggccggaaggacgagccggacgtgggggagttttccgatctcgaattggcgctccgatcagttccgtggcgacgacgaacaggggatgagcttgcgccggatggcgttgattgccttctggagtggcgagccgcccagcctggcgatgttgcacctggggatgcggaagtctggtacgatgttgcacggtcgttcgatgtgccgggccatgaggcgagactcgtggtccgtaagcggttgagcatcggtacgggcaaggagatcgctgttggcgcgcctaggcagagccacacacccgcgccgccgcgagcacgggccgactacggcaacaccgtataccgcaagcgccgacaacagcgcctcgacgccgaccacagcctgtgcgttttctgcaagtccccggccaccaccgtgcagcacatcacctaccgccgcgccggcggcgatgaggcacaggaagatctgcgttcgctctgtcggctctgtcacgatgcggtgacgatgatcgaatccggcctggggatgggcctggaccgcatcaaccccgaagacctgcagtatcgcgatcagatcatccgcaagcgggccgagatcatcgccttccgctcgctggaaacacgccgccggcgcctcgcgcccgaggaggtggagtgatgtttctgtccacgctgctgatcgacaccgggaccaaccccgaccgtgagcgccccggccgcaaatggctgcgcaatctctaccgcgtccaccagcgactttgcatggcgtttccgtcgaaagaacgcaagtgcaacgacgccgacatgatcaagccattctctccggacgacttcggccagggccagattcatgtgcagcgtaacaccaatgcgggtttcctctttcgtgtcgatccgcaacccggcggaagcgtcgccatcgtcgtcctctcggcccttgaacggattggaattacgccttccacaacgcgcgatatctgttggcgggcccgccgaacacaagccaatttgcccccgctgtcgtcgcaggtcagcgtttgcgatttcgtctagggcctgtctgatgaatccagaatcctgaaataccggcggatcatcgccagcttggccatggccaggaaattcaccgcccgtttctcgtagcgtgtgccccatcggcgattctccttcatcc

SEQ ID NO: 935 - DNA, 2701 bp, Artificial Sequence
  Synthetic Oligonucleotide
tctctgttcgtcgtcaggctcatcgggagcctgaccggccacgaggccgtgaacggctaccaagcggagcattcggaccagcgaacagttcaagctgttgtgtggcggtatccgcacgcggcaactcgccaagctgatcgcggagcaggtgactggcaaggcggatgtgaagaaacgggccgtgaagatactggagaaatgcgggatcaaggcgaaggacgacgacaagagcgattcgctcgtctacacgacgcaggatgccattgggaagatcgcacaattgctccaggagaacgatggtgaaaccgacgaacttgccgagaaatgcgggaagctcatctccagccttgtcgcggttccggacatggcgctggccggcaggatgctggaaacgggcgtgctgacagataccacagtggaagcatcgctccaggtggctcatgcgatctcaacgcacgaagcccgccccgaggtggactattacgttgcggcggacgacatccccggcgacgacgccggtgcgggcttcgtcggtgaagccatgttcgcatcggcctgcttctacaaatacttctccatccactgggaaacattgctcaggaatctcgaaggcttcgatggcatcaaagagtttctggccgcccacaccgtcggcgcgttcctgcgcggtgcggcgctggccaatccgacgggcaagcagaacagcttcgccgcccacaacccgcccgatggcattgttgtggaagtgaagaaagaccgctgcactccgatccgttacgcgaacgccttcgcttcaccggtgccgatgaagggaccgcgcgacatggtgtcgcaaagcatcgcccaactgggccagtacatccacgatctggacgccggctacggcaaagcagacaaccacgagcgattctggttctcgccgaatctccactacccgcttacgttccaggaagacaagaaggaacatgcgtgcgcggatcagaatctcaaatccctcgacgatctggttacgcgtgtcgtcaaggcgattggttttgactgggaaaaggttcagacggtcacggtgaagtagggaggtgcggccatgagcgaaaacacgctcctgcttcggctggaaggtccgctgcaatcgtggggcgaccaggagtcgaagttcgtcgtccgaagaaccggccaggctccgaccaagtcgggaatcatggggctgctttgcgcagcaatgggtgtttcgcgggccgacgcgcggcagcgactcgtccaactcaacgatctccggatgggcgtccgcatcgaccgtccgggtgtccgctggtgggactaccataccgtcggcgcgggaatgcagatgcggattgccaaaggcgaaggcgaagtcaagccaggcgcgatgctgacccggcgggaatacctctgcgatgccagtttcctcgttgcgatgcaaggcgactgcgaactgatcggccaactgcgtgttgcattgctccatccggtctggcccgtctatctgggccggaaatcgtgtcctgcgtcccttccgctgctgggccggaaggacgagccggacgtgggggagttttccgatctcgaattggcgctccgatcagttccgtggcgacgacgaacaggggatgagcttgcgccggatggcgttgattgccttctggagtggcgagccgcccagcctggcgatgttgcacctggggatgcggaagtctggtacgatgttgcacggtcgttcgatgtgccgggccatgaggcgagactcgtggtccgtaagcggttgagcatcggtacgggcaaggagatcgctgttggcgcgcctaggcagagccacacacccgcgccgccgcgagcacgggccgactacggcaacaccgtataccgcaagcgccgacaacagcgcctcgacgccgaccacagcctgtgcgttttctgcaagtccccggccaccaccgtgcagcacatcacctaccgccgcgccggcggcgatgaggcacaggaagatctgcgttcgctctgtcggctctgtcacgatgcggtgacgatgatcgaatccggcctggggatgggcctggaccgcatcaaccccgaagacctgcagtatcgcgatcagatcatccgcaagcgggccgagatcatcgccttccgctcgctggaaacacgccgccggcgcctcgcgcccgaggaggtggagtgatgtttctgtccacgctgctgatcgacaccgggaccaaccccgaccgtgagcgccccggccgcaaatggctgcgcaatctctaccgcgtccaccagcgactttgcatggcgtttccgtcgaaagaacgcaagtgcaacgacgccgacatgatcaagccattctctccggacgacttcggccagggccagattcatgtgcagcgtaacaccaatgcgggtttcctctttcgtgtcgatccgcaacccggcggaagcgtcgccatcgtcgtcctctcggcccttgaacggattggaattacgccttccacaacgcgcgatatctgttggcgggcccgccgaacacaagccaatttgcccccgctgtcgtcgcaggtcagcgtttgcgatttcgtctagggcctgtctgatgaatccagaatcctgaaataccggcggatcatcgccagcttggccatggccaggaaattcaccgcccgtttctcgtagcgtgtgccccatcggcgat

SEQ ID NO: 936 - DNA, 2648 bp, Artificial Sequence
  Synthetic Oligonucleotide
tacttctgcctggattgggaccaacttgtcaccaatctcgccgggccgcccccggatgcgcggaaagacaaggaagaattcgacaagtggaaaaccgaagccaagtcagcagccgaaaagctcgccgcagcggcgcttgggcattttatccgcgccgccgcactgaccactcccagcggaaagcagaatagctttgcagccaacaacgaaccgtgcggcattctggtcgagatcaagaagaaaggtaaggttgcaacgagctacgccaacgcattcgccgagccggtggaacggatcggcaagcctgacgatgacgccgcggatgagaagagcattgagggccggagcgtcgcctgtttggcggatcacgtgcagagcgtgggaaacgcgtacggcatcgcttcgaccctcttttggtatagccccaagctctggcgtttccctctgcaatactgggaccgcgccgccgacgggaaaaggaaatccgccaaactcgtcacccaatcgcgtttcgatgtgttgggcggcgcggaaggaatgccggccgggttggtcgaggccgttgtcaaagaggccagcggattggactgggcggatgtcagggacgtcggcaaaactcctgccagggtagcgcgaccatgagcgaccggcccaatacggtttttctgcgcctcgaaggccccctccaatcctggggtgatccatcgaaattcgtcatgcgccgaacgatggacgctccaaccaaatcaggcgtcattgggctgatctgctgcgccatggggctgtcgcgagagaaggcacgcgagcggctcggagaactgaatgcgctgcgcatgggcgttcggatcgaccgcccagggacgcggtggtgggactaccacaccgttggagccggagtcggcctgagaacggccgagggcaacgtcaaaaccggggccaagggaacgctgattacccggcgggaatatctggccgatgcgagcttccttatcgccatgcacgggaacgatgaattgattgaacgggttgccggcgcgctcttgaatccgatatggccggtgtgccttggccgtaagtcgtgtgcgccggccgtacccgttcttgtcatgcaaagacaggctgacggggcgctcaaaccggacaccgcgcaatttgccgacccgctcgaagccctggcgaatcggatttggcagccgcgttaccagcccgaagtgccgcgaaacgagaaaggtgatgcggtcaagagcgtgcggcgggactgtttgattgattgggccgccccagacggaccagatggcgaagtctggtatgacgtgccgacatctttcgatcctcaagctcatggcgcgcgcctggttgtccgaagaccagtaaccattgccgtcggcgagacgctccaacgacataccccgcctccggagcccccgagggccaactacagcaatgcgaaatggacgaaggtcacccgacccgcgcagctggcgcgcgaccaccaggtctgcgtcttctgcaagtcccccgcgacgacggtgcagcatattacctatcgtcgtgctggcggcggtgagacgcaggacgatctccgatcgctctgccgcttatgccacgatgcggtgacgatgatcgaatacggacttggaatggggctggaccggatcaatccggaagacccgctctttcgcgaccggatcatcgaaaagcggcaggaaatcatcgccttccggtcgctggagacgcgccgccgtcggctcgagccggaggaggtggaataatgtttgtgtccacgttgttaatcgacaccggcgccaaccctgatcgtccgcgtccgggccggcgctggctcggcaatttgtatcgcgtccatcagcgactttgcatggcgtttccatcaaggggcacccgcgaatccgatccgtcattcctcaagccttatgatccgcaacagttcgcgcagggccaggtccatgttccgcggagtgacggcgccgggttcctcttccgtgtcgatccgctgctgggcgggggcgcgattgtcgttgtgctttcggcgctcgcacccgattgggattacgcctttcacaatgcacggcacctcctggctgcagccccggataagccgcgcgttttccaagtggcggtcgaggcacgaaaccgattccgctttcgcatgctggccaacgcggtatcccgcgtaagccgccggtctgtacatccgagtggcgggcccgtacgggaagaatggatcggcaagcgggttggcgttggcggcgatgaaaaatcgatgcgccgttggattgaccgtcgcgctgcatcgtgcggatttgcggttgatgagataacgctgtcgcagcccggctacgtctatatcaacaacacacatcaagccggccccgggcagcgattgcgctcggtgcgatatgaaggcctgctcagggtcaccgatgcggacgctttccgccgagctctggcgggcggcatcggtcccggcaaggcattcggcttcggattgctctcgatcgccccggctggctgacctccggggctgctctttgacaactgaatatcccctttggggggaggaacatgatgaaaacctcactcgctgaaatcgggcgcttcgatgatcggctctcgttcctgtacgtcga

SEQ ID NO: 937 - DNA, 128193 bp, Artificial Sequence
  Synthetic Oligonucleotide
gccgcaacctgctgaacgtctcgccgctcggcagcggggccatcgccggctcgacgctggccatcgaccgggtcagcaccgcccggcagttgggcttcgccgacatcgcctacagcagcattgacgggatcagcgaccgcgacttctgcgccgagttcattttcgattgtgctctgatcggcgcgcatctgtcccgattcgcggaggattggatcctgttttcctcgaacgagtttgatttcatccggatcgacgatgccttctgcacgtcgtcgagcatgatgccgcagaagcgcaatcccgacgtgctcgaactgatgcgaggcaagaccggctcgctgtacggcgcgctgatcggtatgctcacgatcctcaaaggccagccatcgggctacaaccgcgatttgcaggaggacaagattcacctgttcgccgccgccgatacggtccgtgcctcgctggagatggcccgggcggtggtggcgcacacgcagttcaagaccgcccggatcgccgccggcctggacgccgggttcctcgacgccacggcgctggccgagtatctggtgggcaagggggtcccgttccgccaggcgcacggcatcgtcggggcgctggtgtcgctgtgcgagaaagacgggcgctccttgtcggatgtgccgttggagacgttccaggaacactgcccgcaagtcggctgcgatgtgtacgagtatctcggggcgcggcatgtggtccagcgttatgcgtcggcgggtgcggccgggcccgaacaagtcaagggccggatcgcctactggaagaaacatcttgctgaacgatgagacctcgcgaagacgatatcacggcatggttccggcagcagagccgcatcgatccggccgcgtttcccatcgggatcggggacgacatggcggaggtgcgcctcaatgagaccgcgtcggtgctgatcaccaccgacatgctcctcgacggctcgcatttcgatctgaagaccgcgacgctcgaacaggtgggctacaaggccatggccgccagtttgagcgactgcgcggcgatggcgaccgtgccgctggcggcggtcgtggcggtggcgctgccgccgccgttcggggcgcgccagctcaaggagcttcacgccgggattacgcgggcggccgagaaatacgactgtccgctcatcggaggggacatcacgtcgtggcgccacgatcatcccttcgcggtcaatgtcgccatgctgagcaggcggtcgacgaacgccccggtgcggcgaaacggcgccagagtcggcgataccgtctgcgtgaccggctcgctcggcggctcgctcctgcgaaagcatctggagtttgaacctcgggtccgtgaggccctgcgcatggcgcagacggtgactctgcactcgatgatggacatcagcgacggcctgagcacggacctcaatcgcatctgcgagcagagcggcgtcggggcgatcattgacgtggcgagcattccgatttccgaggatgccaggaccctggccgatccgctccgggcggcgctgcacgatggggaggatttcgaactgcttttcactctggcgcccgacgatttcacccggctgttgcagacgtgggacgacccgacgccgcttgtccgaatcggccggatcgtcgaaggcacggggatgcagcttcgcatgccggatgggaagctcatcgagctgttgcccggtggatacgaccatttgagcgggcccgaatgagggcgcagaatggaaagaccaatatgaagcacgcacaaggaacgcatcgagcggttgtcgcggcacccattgtcctgttgttgtgccttgtttgcggcggggcggaacatctggatcgggggctggtggccgtaccgcgcgcggatggatcggtttttctcagttggcggatgctggcgacggacaccgaccagacgtgctttgcgctcattcgcacggacgactcggcgtccgaagtccgactcaccgggacgccgcagcgattgacgaatttcatcgacaagggtgcgtgggatccggcggcgtccgagcgacgctacgagcttcgcgtccacgcgcaggaaggcttgcctgtcaaggagaccgcgcacgtcacgatcggcaaggacgcgccgtcgtacatccgcattccgctggcgggcgattacgacttccagaaggtggggatcggtgacctcgatggggacggctcgctcgaattcctcatcaagcagccgaatttcaataccgacccctatcagcggcccggctactggaagcccagcacgactacctataagatcgaggcctaccgtcgggatggcacgctcctgtggcggcatgacatgggctggtcgatcgaggcgggcatctggtactcgccctgggtggtctatgacgtggacggggacggcagggcggaggtgtactgcaaggcgggcgaaggcgacccgcgtgacgagaaaggcctcgtgcagaccggtcctgaatacttggtcaagctcgatggccagaccggacgcatcgtggcccggaccgactggctcagccgggacgggtaccccgactataactattactgtcgcaacttcctggccgtcgcgtatctggacggacggacggcctcgctggttatgcagcggggcacgtataacctgatcaaggttcaagccctggacaaggacctccagcggctgtggtattgggactcgacgcaggagcagacgaagtattccgggcagggttcgcacggcctgattgcggccgacgtggatcgggatgggcgggatgagctggtccttggcgccgctgttctcgacgacaacggcaaagggctttggtcgctggcgatgggccatcctgatgtctgttacgtcgcggatattcatccgtccaatcccggcctggagatcttctatggcttcgagacgcgccagcagaccgatgggatgtgcgtggtggacgcccggacggggcgcaaactctgggcgcacaaggagccgacgttccatctgcacggccagggcatggccgctgacgtgctcgccgagcatcccgggatggaggtgctcgcgggggaacgcgactatccgaagcgctggctctacagcgcctcgggcgagttgatcgaagcgaacggcgagcggcccctgacgccgcggccgctctggtgggacgccgacccgcagaaagaggtcatcttcggccgcgcgatcgggaagtggaatggtcccaccatccagccgattgaaggacaggtgatcgtcgtgatggactgcctgggcgaccaccgcgaggaggtcgtcacgagcgttccgggcgagctgcgcatctatacgacgacgattccgacgcacgagaggcgtccctgtctgctgaccgatcatcagtatcgcatgggtgtcgtcgcgcagacgatggggtattactatcccgcacaactggcgaccgaattctgaaatccgaaatccgaagcacgaaatccgagacaaatccgaatgtccaggacggaaaatccgaaacgaacgtctgaccgccgccggcgtttggggccttcgtgctttgggtttcgaatttgtctcggatttcgagtttcgtgcttcggactttcgccacgacgggcgagcttgtactcatgagggaagtcaccatcacatcgaattcgccggaacagacgatcgcgctgggccgggccctgggtcgccagctcgccggaggcgaggtgatcgcgatcgtcggtccgctcggcagcggcaagacgcatctgatcaagggcattgccgagggcgccggcgccgccgaccgccgggaggtgagcagcccgacgttcgtcctggtcaaccactatgccggccgcctggacctctatcacatcgacgcctatcgcctggattcgatcgccgagttcgagaggctcgggtttgacgacctgtgctatccggaatcggtcgtgctgattgaatgggcggaccgggtcgagccggcgattgccgctacaaaccctgtgcgcatcaccctggcgcacgccggaccgcgcgcccgcaccatccacatcaccgatgcccccgagtatctccacgtctgttaatgccatgctgtgacaccgcagggtggggcgtgcccaccatttgcctgtagattgtgcctgggcctggtctatggacggatttctccgctccgcttcgctccggtcgaaatgacaaagaggggggatgctgcggtcgaaatgacaaaaggagaggcatcgcggtcgaaatgacaaagaggggggatgctccggtcgaaacggcaagggaaagggaccctgcggccacggctctctttgtcaccccgagcgcagtcgaggggtctggccatgaacgcggtgtacgctgggtctcttgagggccactttgacgcggcctgttcctcctcgtgcaggcgccgcagttcagaaccatccctcgctcaggtcgtgccagtcgggattctcggtggcgacgagcgccagtttcttctcccgtcgccagtgtttgatctgtttctcgcgtcggatggccgcgtgaacgtcgccgaacggctcgaagtacacaagcgtgccgatgtggtaccgacgggtgaagccctcgatttcgcctgccttgtgctcggcgatccgccgtcggatattgttcgtcacgcccacatacagcgtccgagattggttcgatgcgatatagacgtagtagactttccccatcggcatgacaccatcgtactgcatgtggccatgcgatgccagatttctccactgcggtcgaaatgacaaggagaggggacgttgcggcgggaaagacaagaagggggccgagggtctcggttggcatgacaagtcgggagaaggcgagtggggacgctcgccctacgctttttttttcgtctgtagttttgcacgtgcggggggtgttttctatggtttggatggactgagaggggccgcagataacgccgcccgacctgttttcgggcgacaaagttaaaggctccgaaatccataaggaaacggaacaggggttggatgtaattcggagacagggaattcacacggtcatgttttttgaaagggtctgcggctcaaaagaaaagtggcaaatcaagtgaccttgcgattcggtcgataaggttcacggaacaagcgacgaacaacgtcgaatcaacccatcgttttccatgtttctttttcttacgcacaacgaggaggacaacaaaatgaaggcaaacagaggctttacgttggtggaaatcctgatcgtcgtggtcattctgggcattctggccgcgatcgtggttcctcagttcacccaggccagcaccgaggccaaagagaacagtctgtgcagcaacctccagtcgctgcgttcgcagatcgagttgtacaaggttcagcacaacgataatgcaccggccttggccacctttgagcagcagatgacgttctgcaccgacatcgatgggaacatccagggcgcaggcagcaaggtgcgtgatgccaccaacggctttatctatggcccgtatctggaaagagttcctgccaatccgttcaacgacctgaacacccttgcggcgatggctgcctccggaacgcctgctgcggtcggagacaataccaccggttggcagtattttgaggataccggcgagatctaccccaacgacgatggatccaccgcgagcggcacgccgcacgcctcgctgtaacaccgccagaatatctgtgtcatcgccagcaacaatctgatagctggttgacatagaggtttgatgaatcaggctgaccgggccaaggccgttgccgaaagccggtcagccttcttcgtaccaccgatgccgaagggctgcatgcctgcggccacatgaggaaagaggagggacgggatggtttgccgaagggcgttcacgctgatcgaagcgacgatcgtggtgatggtgctggcggtcgtagcggcggttgtcgtaccccggttcagccgggcgggcatcgccgagaatcggatggacgatctgtgcaaccacctccagttgctgcgttcgcagatcgaactttacaaggtgcagcacggcgacaggccgccgatgcgatcggccgacggctcgatcgtttgcgatctgggattcgatcagatgctctattgcaccgacgccgacgggaccgtgaagacagaccggccacggacccggcgggacgaggtgttccgctatggtccgtatctcgaagaggttcccgccaatccgttcaacggcagcgggaccatcgttgtggtgcgtgaccggaaggacgttcccgttccgggaaacgccggctgggcctatgtgcccgagaccggcgagatctttgccaacgacagcgttcaccatgcgggcttgtgatgcgtcgaaacgaagaacattctccgaagggctccgtgcccattcggtttacccatacacggcggtgtgctgtgtgaatcgaaaggaagaccatgtgtagagggagagccttcacgctggtggagattctggtcgtggtcgttctgctgggtatcgtggcggccgtggtcattccggcggttgcgaacagcggcacctcggcgcgggccacgacgctggcaaccagcctcaacatgctgcggcggttcgtgttggtgtacaccagccatcatctggaggtggcgccgggctatacggccggtcccggctcggcggtggatgccgcggtctttgccgatcaggcgctgctgtcgagcaacgccgagggacagaccgccccgcgagggaccatcggcttcaaatacggaccgtatctgtcgaagattccgacaaacccgttcaacggcctggcgacgatccagatgctggccgatggacaggatttcccggccgccgccgacaacagccatggctggatctacaaggcgcagacgggcgaaatccgacccgacaactccggtacggacgacgcgggaagagcatactatgactattgatcccaatcgacgaggcatcgcggttcggcgcggttttacgctggccgaggcgacgttcgcgatcgtgctgctggggatcgccgccacgggtgtgctgctgccgtttgcgggcggtgcgaccgtccaggcggaaggcgtgcgccgcacgctcggcacgaggctggccaacgacctgatcgagcggatcgtgagtaccccgttcgacgacatcctgggcctgtacgccacccacctcgaatccgaggggcaggtaggcgacggcaccgatccgatgtatgccgagtacagccggcaggcctcgtgcaaatccgtccgtgtgcccggccagagcgacgacgctgcgccgagattcatcctcgccagggtctgcgtggcgtatcgggggcgaaatgtggcgacgatctatcgtctgatcagtaagtgagtccagtgatttgaattgaggcggactcctatccgattgcgggcggcgattcacggggggagcggattgacatccgcgccctcttgtcatgtcgaggcccggcagggcggccaaggcgtccgagggtagaacggcacgtgccggacaaagatcgcatgaaccgaaacgggaacatcaaggcgtttacgctcgtcgagttgctggtgaccctagtcatcaccgggatcatcctgtcggccgtcgcgacgctggcctacgcgatgagcagtgcggccagggccggcggcgatgcggcgctgtcgcagggccagcttcgcctggcgacgttgcgcattctcgacgtggttcaaaactgccggatggtcctgaccgcatccgacaccgaactggcgatctggcgcagcgactacaacgccgacgggcgcatcaacgtcaacgagctggtcttcctcgactgcgccgcgacgcacgatgcgctttgcctggtgcgttcttcttccgccagcaatccggaggtgaccttcagtggaggtgtcctttcggtcagtcaggccgatgtgatgaacagttatgcgggcgtttcccagccgctcctgtctgagtgcaacagcgtgcagtttggctgggatgttgctcctccgtcgacccggcgggtgacgatcgcgtttgagctgacccagaacgacggcgttcacaagtacgagatcgaggcggccctgcgggcctgggccggccacctgctgaacaacacggccgacgggctggtaaccgaggacgatgatgagtaagcgaccccggacaactcgatcttcccgcaaaggcgtggcgctgctgctggtcctgggcatcatcatggcgatcaccctgttgtcgctggggttcatcgcccgctgtgacatggagttggcctccgggcacaacatggccgttcgcaccgagttggatcaggtggcggtctcagccctggaacacgcccgcggattgctcctgaatccacaggacgccgaaggtccgttctggaccgggggcacgatgcgccaactcgacccgaacacgaacgatttctatgacgtgaccgttgccgccgatccgagcgacgaatgtaccttcgatgtcacgtgtgaggcgtatcggctctgcggaggcgagaaggtggccacccgcgccctggccgccgtcgttcgcctggaccccgccatcggcatctggagcggaaccgatctgtcctttcgcgcaacctggagcatgatcggcgacgtgtacacgcctgggacgttcaccaatctgggtgctgccggggccgtagacggtgacctcttcgccggcgccctgagcggaggcattgtcggaacgtataagggtgccgggagtctggcactgacgtggccccccgtgacggcgagctacagccatccggactacgtgacctcctccattggacccggcacggtcagcgccggaagctacagctcgccaaagatctggcggtgcgacggggatttgaccctcagcggggcggttgtcgtcaacggcatgttgctggtagagggcgatctcgtcatcaaaggcagtggagcaaggctcaccgccgccaagaacctgccggcggtgtatgtgaccgggaacctcatccttcacggcgccaccagccttcagatcgagggccttgtctgtgtggacggcgacgttctcgtgggacatggcaccaaggctcagatccgcggcgcgctattcgccgctggcgagatctccgaggccgcgattgattccgccgggttccccaacgaggctattttgcggaacataccgacgtggcccggcaacggcttgctggaactcgatggcgaggaccagtacgttcagacgctggacgatgaaacgactctgcaactgaccggcgactacacactgatggtgtggctcaagcccgagctcgttcagaatccgtgggccggagtcctctgcaagactgatccaaccggaagcgtgaaccactgggtgcttcagttcgacgaatctgcttccagactcattgtcctgcacgggacaaccgcaaccaggtgggacacgggaatcacgttggctgattttgccgacggggggcacggtgtcagtgtgatccgccggggaaacgatatgaagtcttatctcgattgggtcgaacgtgcctcgggcaccctgtcgacgtcgcctgggattggaaaggggcacctgaacatcggcgccgaccgcacgggtgataatgtcttcaagggacaattggacgacgtaagtgtgtacaacggtgcgtccctgatcgggcgctggaccttctattcgagcggctccgagctgaatgtggttgcatcgcccacaagggcagcaatcagcacgtgggcttcggggaagcgggaagactggagcccggcgggaggggcttttttccgaagcatcgattcccggcaagagtgaaatggcacagcggatgatcaggtcccagaacacaaaacggtttatcggtccactggaggccgacgggaaaaaagcccgagttgcagcagcctgcggcggacgcgcgtgcgtcaaaggctttgcccaggccgcctgtttgacgcgacaacacgtagcggttgagagggcttttttcaggacgttgaccgcgtcgcaaggcgcttctgacgcctgtagggactgcctgggatctcgccgccggatagcagacggcggtcgcgccggtgatcttgcggcggccgtgcgaatcctcgcatatctcggcggaccggtccgatcgcaggttaagccgacttgccggcaggtcgaaagagaaacggaggtaaagttgaccatgggtaggaatacgacagcacaatctgttgggcaggccgcagggtcttgtgccggattcacgctgatcgagctgttgatcgtcatcgtgattctgggaatctctgcggcgatcgcggtgcccatgatgtcttccgcggcgagcatgcagatacgcgccgccgccggcattgtggcggccgacctcgaatacgccaagagtctggccatcaccacgggccagcggcacaaggtggtgttcaacgtgggcaacgacagctacgaaatccgcaaggttgtggacgcggtcgatgaggcggtcaagcacccgatcacgaagaagagccagtacgtggtcaatttcgccaccgatggaaggctggatcgggtggagatcgacagtacgacgttcaccggcgatgccgtgacgttcgatccgctcggcagcccggtaggtttgcttgctgaaggtgtggtgactctacatgccggggatttcacccggaccgtgacggtcgaacctgtgacgggattcatctccgtttccgaatgagtgattttgatatgcgactgtcccactggataaacaggaaagagaagatcctgcccatcgggctggacatcggacacagtgtcgtcaagatgatccagttggcggtgtccgacgatggggttcgggtgcttgctgccggcagagcggtcgtcggtctgaatgatatgagcgacgataacgcatggcgacagcgggtggcgccggccattcggcgtctgctggccgagggcgccttcaagggaagggatgtcgtcacagccttgccggcagacaagctgagaatcacctcggtgaggctgcccgagatgccgaatgaggaggtggagcagacgcttcgcaaagaggcggcccatcgattcgcgctgaacccgaagatcgacgccatcagctatgtgctggcggggaacgtgcgacagggtgacgaactcaagaacgaatacatcctgttcgccagcgacgatgaggcgatccgcggtcatattgcccttctggaagaggtcggcctgcaaccgacgggcatcgacgcatcgccctgcgcgctgtttcgttgttttgagcgggtgatgcggcgccaggaggacaaggaacgcaccatcatgttcctggatgtcgggcatcggtacaccacgatcgtcctggggcgggccggcgagatttgcttcgtcaagcagatggcgttcggggccgcccggttcgcagaagacatcgcggccaagctgtcgatctcggtgaccgatgcggaggccttgcgccgccagatgatgtccgacgactcggtcgatgcggcgacgcgccggctcgtcgttgacacgctgcacggcaccgcggagcaactggccggagagatctcgttgtgtcttcggtattacacggtgacgttccggggcaaacgagtcgagcgggctctgatggcgggaggtggtgtccacgaggaggccttgctcagcgtgatgaggcaccacctggccattgaaacggacatcgccgaaccgctgcgcgggtttgatctgacgtcggtcggggtcgcgatggaagacctgtatccggcggcggacttctcgctggcggtcgggctgtgcctcaagggatggggcgcttccaccgtgtccctggtgaaatcggatgtcggactggaatccatactggaaggtgcatcctagtgaaagagatcgattttcttccagaatggcatagagaaggcagacgtcgccgccttcacatgaggcggcaatatgccgcgctgatcgtcttgtttctggccttggtgacatacaacgcggtagccacgcacaggatcgcgcgcgccaacgcggatctggccaggctggaggaccgacgattctgggcggaaggtctggtgcatgagtacaacatggtcacacagcagttggccgcccgccaggccaaggtcgcgttgatggagcaggtcgatgcgcgcatcgacctggcggcggtgctggcagagatcagttacatcatcggcgaccgggtgctcttgagccgtctggagttcacgtcggagcccctggccgctgcggaaaagacctcggaacgggacaagaccgcggtgcgtagcgccagcccctcgcgtgcgaccgccaagacggcctctctggggagggtgcggtttcgggtggccctggcgggaatcgcggtcgattcggccgaagtgggggcgctggtccgtcggttcgaagagtccccgtacttccaactggtccatccgctgtatcgcgacaacacgattcagattggtactggcgaatcgtcgggttcgcgtacgagtgagaacgaggcccgacgtgtggagacgcgctcgatcagtgtcacggagtttgagatcacgtgctatctggccaactatgaggagcgggacacgtgatgagcgagagacgatccaattcctggctgagtcggcagcagttgtgggtgttcgccatcggcggcctgttcctggcggacttcgtcctgtacgggtatctgccgttacgcgaaaggctccagtctctggggcaagcgaaaacgcgtcacctgcagttgatctccaccgccgaggcgcacagccacgtgctgccgtccctgaccgcgcgactgagagagaccgatcggtatgcccggaactatgaggattggattcccaatgaaagtgccctggggcaattcctgggacagatcgcccggatcatgacggaaaacaacctgtcggaccaggatgtggtgctcggtcaggaacaggtctcgggtgacctgatctgtataccggtccacatgaagtgtgtggggaacctgaacggaatcttcggattcttccaggaccttcagaacctcggtcggctggtccgcatggagaagaccaccctggccaacacgaaggccttcaacggcagcgtcgccatggaggcggacgcggttatcttctatcgggcgcggaagacgcaggacgcgagcctgtccgcgaaccagaaatgaacggacgccgtgaacgatgaagcgtaatgccgccaatccattgggctcggtttcccggatgacgagccacctgatccgaggtggcaggaagacgggcctggcgatggcgctggtggtcgtgatggccgggatgtggttccgcgtcctgaccggccagagaccgcgcggggtggaagccggtccgaatcccgcgtcgcagacggaccaaccgtcgaaacaggagccgcaggtgcgcctcgtccacttgcccgtggagcccgggcggcatgaccgcattcacagagacttcttcacgacacaagactggagcggctttgccacggtatcccattcacagagcacgggtcctgttccagaagtacagccagtgacacccactcgaaccaatgacgtgatcgacaaattggccaagaccctcaggctggaggccgtgttatggagtgcggacccgcaggcgttcgtcgacgatcgattggtacgcctcggggataccatcactcttcgagacggctccgagacctacgcattcgaagtagtacagattcaagaaaatgccgtgcttgtgacctgccgcgaccgacagtggacgctgaagctgtcgtcgcccaccgacgtaagaaagtgacgcattggtcttagaacgataatgaaatcagtacaaccaagcaggatgtggaagaacaggagtaaggttatgcattacgacagaacaactgtgaaatcttgccaggcccggtggggccgacggctttgcgtgctggcggtgctggccctgttggccggacccctgacggccgccgagagcgatccggtggcaccgacgtccgaaacgacgctcgatacgctggccattgaacccgatcaggcccaggtggacttctccggcgacggagtcgtcatcaagttcatcgcgttcaagaaggacggcgatgtgcgggacgggctgcgtctgctggccaagctgtgccggaaaaacatcgtcccttcggccagtgtgacagggcccttgaattgtccggaactgcgggatgtgacgtttgaacaggcgctggcggccatgctgggcgacaagttcgtcccggtgcaggacggcaacctgattcatattcgcaccaaggaggaacacaagaagatcaaggaagaccccgaacggatgatccacaaggtgatcacgctgtactacacgacggcggaagaggccgagaagctgatccgcccggtgctcagcgccagcgcgcagatcaccaagacacaggccgccgaagagaagatctcctccgccagcagcacgggttcgggtggagggtctctcagtggcggcggcggcggtgacaacacggccaccaacgacatgatcgtgatcttcgacttcccggagaacatcgagaaggccgagtcggtcattgcgcagatcgacattcggccgaagcaggtcctggtcgaagcgaccattctggccgcccggctgaccgaacagacacagttcggtgtggactggaaccttctgagcggcgtggctgtcaccggttttccggcgaacattgtcggaggccagggtacgccctgggaaaccagcggtttccgggttcccaacgcggccggcggtctgcgtgtcggattctcgtccgacaacgtccaggccatcatcacggccctggaagaagtcacggatacgacgctgctggccaacccgaagatcctggcggtcaacaagcaggaaggctcggtgctgatcggtaagaagctgggctatctggatcagacgacccagacccagacctcgaccacgcagtcggtggccttcttgaataccggtacccagttgatcttccggccgtacatcggcagcgacggctacatccggatggacatctatccgaaagacagcgacggcagtctgaacgcccaggggattccggacgaaaccaccacggagttgcggaccaacgtcatcgtcaaagacggggaaaccgtgattctgggcggtctgttccgtgacagcatcacggctacgcgcgcgcaggttcccttgctggggagtctgccgatcatcggagccgttttccggggcaccgacgacacctcgctgcgggaagaagtgatcatcctgctgacgcctcacatcatcgaagagccttcggaggtcggcggcgcggaccgtgccgacgatatccggctgaagatggacggcgccaagcacaacctgcagggcctcgatcgcgcccgcatggcggaggatgcctacgcccgagcggccaagtactatctcgaaggtgatgtcgacagcgccgtgtacaacgtcaaggtcgcgctgatgatgcgtccgacgtatctggaggcgctgcggctgagggaacggattatcgtagaaaccgatcccgaggaactcgagcggatcgacagcatcgtccaacaggcgattgatcagcaagaggcccggaactggaagagacgctgacgcgtcttccctgatcgaaggtcatgcccgtagtctacgggttcggaggagttgttgtgagacgccaaagacgcttagtctgggccgcgattgccatggtgatggcctcgctgtgcatcgcggccctgaccgggcctttccattctggcatcggagtagggtggcgcaaccatctcgttgcgtggcgtcttatcgcctgctgcagcggggctgtgggcgtgatcatcctgggtctggcctaccatcggctggccggggcgattgcgtccatagcccggcagctttcctgcgacgcggccggctcgatggatctccaagccgtcgagcgggcggccgcgacggttcagacacgcctccaggaaggccagaaagcccttcgcacgctggaagccgaactgggcgacctccgcattcgatctcaacttgccgatcgacagaagcagcacaccgaggcgatcatttatagcctgcgcgacgccgtgctcgtggtggatgagtccgaccggctgctgatggcaaacgcggccgccgcccagctcttcgggttcgacccggagcaggcgcgctaccagccgcttgagcagagcatcgagccggcgcacaaggatttcgttcagttgattcagcgttgccgggaaagcgccacggaggcgacgcgtcgcgagatgcagttcgtccggcccgatggtccccatacgttcgacacgatcgtctcatgcgttctcgagcgggaccgggtcttgggggtggtcgcggtgctgcatgatatcacgcgagaaaaggaagtctctcagatgaagaacgacttcgtcagtcacgtctcgcacgaattgaagacgccgctggcttccatcatggcgtattcggagatgctggccgacggggaggccgacgatgagcggacgcgcaaggagttctaccaggttattcagactcaggcgcagcggctcaaccggctgatcgaggatattctcaatgtctcacgaatcgagtcgggactgatcaaggtccagaaagaaccggtcagtctgacgattctgattgaacagcagatgcagatgatcaagggattcgccgaggagaagggaatcacagtcacggggcagaaacccatcgtgtacgaccaggttctggctgacaaggatatgatctcgcaggtgatcgtgaacctgctgagcaacgcggtcaagtacactccccccggcgggaccgtgcggatccagacggaggtgaacgagatcgaggaggtggtccgcgtcaccgttacggataccggcgtcggcattcccgccgacgagatcgctcacgtgttcgacaagttctatcgggtgagcgccaacaacaagcaggccaaagggaccggtctcggcctgaacctcgtcaagcagatcgtcgagaaagtacacgacggtcgtgtgttcgtcaccagccaggtgggtgttggaagcaccttcggattcgagctgcctctggcggccgccgaactggccggcacgacccgataacggcggagtttacgcctcttcacggagaggggattcccgaaacccagttttggagtggatgaaaatgacaggcaagaaggtgctgattgcggatgatgagatccacattattcatgtcgtggcgatcaagttacgcaacaacggatacgaggtgattgcggccaacaacggagccgaggcgtatgaactcgcatgccgcgagaaccctgacatcgtggtgacggattaccagatgccgttcgtcacagggctcgaactgatcgagaagctgcggaagaacgaggccacgacgcacattccggtgatcctgttaaccgcacgcagcttcgcgatcagtcaggagatgcaggaggcgctcggcgtgcaggagtgcctgagcaagccgttcagccccaaggaactgcttaagacaatcgaggacattctctatcagcgtgcggttgcggtgaagaactgattccacggccgcgacgatggacgacgcacggcatacggtgaggaaccctgagagggccatgctgaccagaacgacaccaggactgacctgtctgcaacgacgcgatctggagcggttcggagagcgcattgtgcagtttggtgtgaatgtctccgtggttgacccggacggccgcatggtggtcctgcgcaatggggggcaattcgacagcgatccggaggcgatggaggaggcggcgcgcgccgtctcgcaagccatggccagacatccggccgaacgttgtgagggccgcgtctgggagttctgcgaccgtcggaagctgctggcggttccgttgtgcctgccttgtgcggcgaccgccgaccatatcctggcgggcgtgatcgtcgccgatgagggcccgccggaggccggcgcgtggccaggcgacgggatgcgagagagccggacgagcgattcgttccggttctcggcctgcctgcgcgaaatgctccagctcatggcgcagaatttccagctctccgcgcgcagcgacgggcagatggaaaagatgggtacggaactggcccaggtgtacgaggaactggtgctgctgcacaagatcagcacgcacatgaaagtcaccgagtcggacagcaccttccttcaactggcctgcgacagcctgacggacatcgttctggtcgagggaatcgccgtcgtgctggagcgggtcatcgacggagagaagcggttcatggtggccgccgggtcggggctcatcgatctggacacccgcacggccgctctgctgcacagtcgcctcacggaagagattcgtcgaggccaggaggctctgctggacagcgcgatcgacaggccattccggtatgaatggcctgcgagcatccggaacatcattgcggtgccgctgtgcgcgaaggagccgcagcattcgcgtcgaacggttcgtgcctcgaatgcggtggcgatcatcggatacatggtcgccgtcaaccgcatcgacaagcccgatttcgacagcacggacatgaagctcttcggctccgttgccagtggctgcgccgtgttcatcgagaacggacgcctgttcaacgatctcaaggaactgttcctcggttcgttgaaggccctgacggacagcatcgatgccaaggaccagtatacccgggggcattccgagcgcgtcgcggtcatctcacggtggctggcggaacgcgtcgcggaacaggagcctctggaggacgagcagattcaccggatctacctggcgggtctcctgcacgatatcggcaagatcggcgtggacgagaacgtgctccgcaagaacggcagactgacgtccgaagagcgcgagatcatccagcgtcatccgtccatcggggccgggatccttcgcggcatcaagcagatgcgcgacatcgttcccggggtgctccagcaccacgaacgcgtggatggaaagggctatccggacggcttggtgggcgaccagatttcgctgaccgccaagatcctcggactggcggacagcttcgacgcgatgacgtccaaacgggtctaccgcgatgccatgaccctggatcgggcgctcgaggagattcggaagggcctgggaacacagttcgacgagaggatcggccgcatcttcctggagagcgatatctaccatctgtgggacatgttacaggaaaacggcccggcgatgtacggtgcgggccattttgctgattatgggacgacggcgatagggactttgttgcgatgaagatcaacctgcagaactacaacgacgtcacggtcatcgagttgcagggtgaactcgatggagacatcgaggaatcgatgaaggacacgatgacccagaccgtggccgcgggccgcaaacggatcgtggtcgatatgagcaacgtcagcgccgtggatagtcagggactggagctgttgctgtgggtgcggcaatactgccggcagaaccgcgtgcagctccggctggccggactcgatgagaccatcgagaagatcctcgagattaccggcctccagaccgaattcgaccgtcacgtcgagttggccgaggccgtccgcagctttgcctgatcgccgagggcatggggaccgtagggtatgagtcagattctgcttgagaacaagatgcagctcggccagcttctgctggcacgaggcgtcgtcagtcaggagcagatcgaccgggctctggccgaacagcaggagaagggccatcacaaactgctgggcgaattgctcgtcgagatgggctattgcagcgagaaccagatcgcggcggccctggccgaggcctatggggttccctacgcgcaggtcagcccgaagttgtgcgatcccaaggcggtggagctgctgccgcgtgagtttctcgaggcacacgtcgttttgccgctgttcaaggtccacgatgttctgactgtggccgtcaacgagccgaccaatgtctttctgatcgacgagatcgagcggatcagcgggtgccgcgtccgggtcgtctgctcgaccaccaaagacatccgggcgacgcttcagtcctacctgccggccgccaacgtgtttgtgatcgacgatattattgacgacgaggggctcgaagagtttacgctcatcgagagcatcacgcaggacatcagcaatctcgaagaggtggccggccaatcccccgtggtcaaactggtcaactacctgctgtacaacgcggtgcgcgagaatgccagcgacatccacattgagtgcgatgagaagcggctgcgcgtccggtatcgcgtcgacggcaagctctacgagaagatgcgtccgccgtatcagatgcacgccgcgatcgtctcccgaatcaagatcatggccgaactggacatcgcgcagcgccgtcttccccaggacggaggcattcacgtcctggtcgaaggtcgtccgatcgatctgcgcgtctccgtcatgccgggcaatcacggggagaaggtcgtcattcgtgtcatcgatcctcagaagatcctctacaacctggaatcgctcggtttcacctacgacaatctcctgcgttttcgccaggtcattcaggtgcccaacggcatcgttctcgttaccggcccgacgggctccggcaagaacacgacgttgtatgccgcgttgtccgagctgaacagcgaagaggtgaacatctgcacggtggaagaccccgtggaatgcaacatctccggcatcaatcagttccaggtcaatgccgcggtcggtttcgagttctcgacggctttgcgaagcctgttgcgacaggaccccgacattatcatggtcggcgaaatccgcgatcaggccacggccaatatcgccgtccaggccgcgctgaccggacaccttgtgctctcgacactgcatacgaatgatgccccgggtgcggtgacccgtctgctcgatctgggagtagccccctatctggtcagcgcttcgctcaagggcgttctggcgcagcgactggtccgcaaaatctgctcgaactgcaagaccgaatacgacccgccgcccagtctgaagaaggccgtacaggcccagggtggcgaaacctgcaagttctatcgaggggtggggtgcaagaagtgccggaacaccgggtatgccgggcgcatcgccatccacgaactgctggtgccggacgacgaaatcatggagatgatcaatgaacgcgtcagcgccaagaagctccgggccgcggccttggccaagggcatgacgccgctgcactttgacggcatcgaaaaggtcaaggcggggatcgtgtcgattgaagagatattgcgaatcacggctctggatacgacggggatgggcgaatcctgagaccgatggaatagcgaagtgggcctatggcgaccttgatgacagagatgcgaaagaccggccccgacggcgatacgtcggcggcgggggccccggaaccgaagccgggctccggcggtgccgcgccgggtgcggcggacccgggaccgatgggaaaggtgcgcgccaagagcggcgacctgattctcttcacgacgcagttggcggtcatgctcgacagcggtgtcattctcagtgacgccctcgacgcgatcggggaacaggccgcggacccgcgattcaaagccgttattctggacctctcggatcgtgtcaagggcggcgagacgttttcccgcgccctgacctgctacccgaacacgttcaacaagatgttcgtcagcatggtgaaagcctcggaggcttcggggcgaatggtcgagatgctgtcggtcctgaccggatacctcaacttcgaggccgacacacgcaaacgcatcctcggcgcgctgacctatcctctgatcatggtactgatggcaatcgccgccaccggcacgctgatgttcttcgtgctgccgcgtttcatgcggatctatgagacccgggaagcggcgctgcccaagctcacccaggtactcgttcatatcagtcatgttctgggcaacggcgagatgatggccgtgctggtgaccaccgccatcctgctgggcacgggcctgtacggctggtcgcacaccgtttcgggacggcgcgtcctggacgggatgaaaatccggaccccggtcattgggaccatgttcgtggacatggtcgtcacgcggagcatgcggatcatggccacgatggtcaacacgggggttcgcctgctggacgcgatccgcgtgatccagggctgtgtggacaattactacttccagcaactctgggaggaagtggacgacaagattcaggatgggtaccagctttccgaggccattctcatctccgagcgtgccaagctgattgcgcccggcatcatccagatgctgcgggctggcgagaaggccggtcggctgggcgaggtgtgcgacaagatctccgtcttctacgagaagaggctggcggcctccattcagagcgtgatgacagtgatcgagccgctgatgatcacccttctcggggcgatcattggaaccatcgccattgcgcttctgctgccggtcttccgcgtctccagcgtgattgctcactgatcgggcatggccacggaggcaagcaccttgcggcacgtgcagtggttgcccaggtggcaaagcgccaactgtggtgcgacaaaatcgatcgggaatgtcatgggctcggtcaccacgccgtacccgatcgtgatgtgcgggaagaacgcctcaaacgcggccttgcggcggtagtcccgaatccacgccagcgtactcggcgctgcctcgtcgtcgccgcagagcatctcggcggttacgttgccgctcagggggggctcccggatctccaggatctgctcgtgcagcctctggagggccgcagttttggccacggcaaagagcgagttcggctcgttccgcgcattcagcaccgtcacgacccccgtgaccgtgagcttgccaacggggcaggccttcgcgatcccatcgagcctcttctggatcgcatcgacctgatcggactcgatgcaacccatcgccagcgagatgtgcggcaggcacgtggtctcggcgagcacgatctcgcgacaatggctgccgatcagcttgcggttcgtctcgatcgccaattgcgcgatcttcgcctcaggcaagagcacgatatcgacggcgatctggctcatcgtgtcctttcttgcatctgtgcaacgacctcatcgaattgccgcaacaccatctcatcggtctgttcgatgaatcgagtgacgatggcgatggccacacagttggcgacaaaccccgggacgatctcgtacatccgttcgctcatacccacctgcttccagaggaccagcgtgacggtgccgcagaccatgcccgccagcgccgccggccagcttgttcgctttgagaagagcgcaaacagcacgaggggtccgaaggctgcgccgaatccgccccaggcgtaggcgacgatctccaggatagtctccgtcttcacgcccagggccaggatcagagccatcagcgagatgacgaggacgcacaggcgccccacgaggacgacttcgcgcggagtggcgtcgcggtggatcgcccggcggtagaagtcctcggtcaacgccgatgacgagacgagcagttgcgaatcgatcgtggacatgatcgccgagaggatcgcggccagcatgatgccgcccagccacggacgggtgacttcggcgatcatgtagatgaacaccttctcggggtctccgcccggcacggtccgaaacagcccgatgccgatcaagccgatcgcgacggccccggccagcgagatgaatacccagaccatcgcgatcaccatcgaccgggagagtctggcgagcgatttgacgctcatgaaccgcacgaggatgtggggttggccgaaatagccgagtccccaggccatcgccgagacgaccgcgagagaggcggccggtccgccggcggggctgaggctccgtgcgatgtccttcaccgccatgccgtcctggatgccggcggagcccccggcccgcccgtaggccagcaccggcacgacgaccagcgcgatgaccatcagtgaaccctggaacacgtccgtccagcaaacggccaggaaccctcccatgaacgtgtacgcgatgatgacggcgccgccgatgacgaccgcgaccggatacgagacgccgaaggtggactcgaagagcttgcccgccgcaaccaggccgctggaggcgtagatcgtgaagaagatcaggatgacgatcgccgagacggtccgcagcaggccggtagggtcaccgaagcgcgcctcgaagaaacaaggcagcgtgatggaattggtcttctgagtatagagccgcagccgccgcgagaccagcagccagttcaagcctgtgccgatgaacaggccgaccgcgatccacgcgttcgtcaggccgccgacgtagattgccccgggcaggcccatcagcagccagccgctcatgtcgctggcctgggccgacaacgccgtgacccacgcacccatcccgcgcccgcccagcaggtactcctcgatgctctcgttgcgccggtagaagtagaacccgatcgccagcaggacgacgaagtaaacaacaaacgtgaccatcgtctcggtcgtcatcatatagtccaccatccgccgctcataccgcatgaccgcgcccacaacgcagccagcatcgcggcacaagggactccctctttatccgtccgagagccgcctctcttctcttgtcatgctgagcggagcgcagcgaagtcgaagcatctggccaaaggccatgcgcgcctcttgtcctcgggtagacccctcggcaggctcggggtgacacattgatcgttgccaagtacttcatttcattttctttcgcgtgagcaacttcttcacccatccgcacatgcgctccatgaaccctttctcatgggcgacgccggaccgccggccgtgaacagcaccgcgaatcgcgtcaccagcgcccccagcagtacatatccgagaatcacctgcaacatcagaagcacctgcccgcacgtgctgtccggattggcggcgatgtcaccgaaccccagcgtcgtcatcgtcacgaccgagaagtacagcgcgtgcacgaagccacgaatgtcaccggcctccccatcgaccgcaagacagcccggccacaaccggtagacaatcacaaagactgatgcgagaagcccgaaactgacaatgacgcgccacgtggacaaaccgtaatcagatgccagccagaacagtcgcaccggccatcgcaggcatcggtgttccttgtaccattgctcccaattcatccggcggatgttgtattccaggagttggcttgtgtctgggtagattcgcgttacagcaagagcgacaccctcaaacttcgtgttcctgttcacttcacagcggtagagcaaggttgtcccgtccacgacaaaccgggagaaatcggcatcttggaggcatgcataccgcaaatccgctccgccgaggaatgcagcgataagcttcgaatgctccagatgagaacaactcaaatcggcctgctcgaggtaagttccgtgaagcttgactccttcgagatgaaccttgccgctgaacccagaattcggaaaggcaccaagcatggcccctctcatgaagccgttctgtagtgtgatgttttccagaaggacatcctgttcggggtgctgtcttcgccagtcgttccactcggtcatgtcctgtctgtcggagcagcgtttgagcatgtcgtactgcccctggctgaagcggggttgccgctggttctctccctcgtctggccttgccatcgcatcatccctcaatacggcgtttcgggttcatagtcggtctggcctcggctgagattggctttgttcttgggcggtaaaccgcgtttttgggccaaaaacgcggaaattggctttgtttggcgcattgtggtccctccgatctgtcggacgatgcatccctcgggcctgcggccggtggtctggagcctggctcagattgggttcgatcgggttcgtttcctcggtcgaatcgctgttcttgggctgaaacggccgataattgggtttgttttgcacgttggggggccggtggaggggcgatcccggcccacagccacccgagacggtggtctcgattgcttggaactggtgtttggatggccatgagtgcgtccctggtgctgacggtcaccgatggactattgagttatgtggatatcatacaactggtggctttcggcgtcaacaaaaaaaaccggaatccgggccatattcttcagtccgcgacgattttttcgtcctgctctcgccaggcgggatcgacgatacagaggaagacgagatcatcatcgccggtgttttcgatgaactgggtggcattcggcgggatgtagacggcgcagccggcgccgacaacctgcgattcgttgccgataaacatccggccgcagccgccgatgacgtaatagacctccgaggaggccaggcgatgcggcctcgtcgcctctcccgcgccactctcgcgtgtgccaggctgtagcgaatctccgcttccatcttgtccggatgcaacaactcacgcagcagcgagccgtccccggcaacaaactcctcgcaatcgctcaacgaccgtacgagcattacgatcctcccaacagaatcgacccttccgtgaagaacgttccggcgacgcaggcggtcatcaggcaggccagcgttgcagcgatcaaggctcgaaccgcgaccggcccgatgttccgcgtctgctgcggcgccagggcgcagaggctgccgacgaagatcgccatcgacgcaatgtgggcgaatccgcacagggcgtacgtggcgatgaccgccgagcgagagtgctgcaagaggccgttcttcattgcggccgccagatcgttgtaggcggccacctcggtgacgatcaggcgttctccaacgattcgcgaaatctctcgaacgtccgccagcggcacgcccaggatcagcgttagggggtagaacaggtatccgaacagggcccggagcgaccactgtccctgccagccgaacgcggggttgatccatgctccgagcccgccgaggagcaggtccgccagcgccacgaggcccaggacggcgatcagcagggcggcgatgccgacgatcatgcgcactccggcgttggcgccgttgacgatcgcctcgaacagtccgctgtctttctcgtagtaaggctcgacgcgaacaccgagcgtctggggctgctcgctttccggcaggaggattttcgacatgaccaaggccgccggcgccgagagcagggacgccgagaccaggtgtccggcgatcatcggaaactgctcccgcaggctgaagacgtacaacgccagtacattggatgagaccgtggccattcccgcagtcaggatcgtgcaggtctccgaccgcgtcaggcgggcaagatgtggcttgacggtgagcatggactcgacgcccacgaagatgttgctggcggccaccagcgattcggcgccggagatccgcatcaggcgggtaaagacccgggcgaaggccttgatcaacagcggcatgacccgcaggtaataaaggatcgcgatcagcgcggagaagaagatgatcgtcggaaagccctggaacgccaggatgaagccgagcgaggtttcgccatcgtctccagtctggccgggtccgagggccaggcggccgaagacgaagcgtgcgccggcgccggccgagtcaatcacgcggacgaccccgtcgttgacgagcaggaagaccttcgctccggccggcaccaggaagatgaacgccgcgacggccagttgcagcacgacgccccaggcgatcagccgccggttcatgttgcgtcgctcggccgaaaagacccacgcgacgcccatcgggacgaagatacccgtgaagctgacgagattgtagatgtccatgacgacggattgtacagacaaccggggagcgttggaataccggactgatgggtagactggggtgtgccgaagcagtggagtgcggtacgcaccctactttgtcagctcgctgacgtctttgaggatgtggtgcggccggtaggcgtagcggtccaggtcggactccttggtgatcccgctgaggaccagaaccgtgtcgatgcccgactcgatgccggcgatgatgtccgtgtccatccggtcgccgatgatgaccgtctcgtcgcgttcgcactggagcagggtccgggcgtgtcgcatgatgagcggattgggcttgccgatgaaatacgcctgccgtccggtggccatctcgatcggcgcgatcagggcccggcacgccggagcgatccccttctcggtgggccctgtcacgtcaggattggtccccaccagccgcgcgccgcccagcaccagttggatggcggtctcgatcttctcgtagctgtagcttcgcgtctcgcccaccacgacataatccgggctgttctcatcgacggagagcccggcctcgtacagggcctggtagagtcccgagtcgccgatggcgaagacccgtccgccgggacattgcgaggcgataaaatgggccgtcgccatcccggaggtgatgaaatggtcttcgcccacctcgatgcccatgtgcagcagcttctggtgaagctctcggggcgagcgagcggaactgttggtcaggaagaggaaccgcttgccctcggccttgagccagtccacgaaggccttcgagccttccagcagacgcgaaccgtggtaaatgaccccgtccatgtcgcagacgaaaccgcgtttgcttctcaactgttccatcgattctccagaaaccaccaggagtgccccagccgacatatgcctgtctgagattaccggatcagtctggaggcgtcaaggcgggccttggaacggttgcgctcggtcgagggttgacagggccggatcgggtctctacgattggggtactgggcaggtcggttctacgggcagaaggtcggggtcgcagccatggcatcgctcattgtcacatcaggcaggcaggaaggggactactatccactcgggcatcggaccagcgtgatcggtcgggacgaagccctgctgattcagatcctggacaacatggtgtcccgcaaacacctgcaaatccgcttcgacgagaagacgggccgatactacgcctacgacatgaagagccgcaacggggtgtacatcaacaaccagcggatctccggcgagacacctctggtcgacggagacgtaatcctgatcggactgacgacgctgctgttcatcgacaaggacttcaaggacagagacagcgcgctgttgcactacaagaaggtgggcgagcggatgcgtgtcacggtgtacggcccgcagaagatcgacgaggtcgatcgcggccagggcgagaccggccatcccatccgctggtagttggggcccggcaggcagacgaatcaggacaaggaggtacggatggaccgacgggagatgctgggggctcttggatttggcgctgcggggctgctcggactggcgggccggcggcaggacgcctcggccgcagagtacgccagagcgacaaagggcttgcccccgctgaagatcaccgacgtccgggcgatcctcaccgcgccgcagggaattcgcctgtgcgtggtgaaggtcgagacgagcgaaccgggcctgtacggacttggctgtgccacgttcaaccagcggccgctgacggtcgtgacggcggtcgacgagtacctccgaccgttcgcaaagggacgtgacgctgagaacatcgaggacctttggcagaatgcctacaccagctcgtactggcggaacggcccggtgctcaacaatgcgctgagtgggctcgatcaggccctgtgggacatcaagggcaagcgggcgaacatgcccgtgtatcagttgctgggtggcaagtgccggttcgcggtcgattgctacacgcattgcggcgggggcacgctggcccagatcgaggagagcgtccgtcgggcgatggagcgggggttccgtcacatccgcatccagcgcggcggctacggctcgccgcatctgtcgaagcaggccgatttcaaggaggccggtttcggcgcgccggtcgattcgaacatggaggtccggccctacgtcaagggcacgctggagatgttcgaacatatccgcaagacgtgcggcgacgacgtcgagctgctgcacgacatccatgagcgcatccctccgatcgaggcgatcaatctggtcaagcggctggaagcgtatcggccgttcttcatcgaggacccgttcgcgccggaggacatcggctatttcagactgctgcgtcagcagacctgtgttcccatcgcgatgggcgaactgtacaacaacccacacgagtgggtcgggctgatgagcgagcggctgatcgacttcatccgcgtccacatctcgcagatcggcggtttcagcgtggcgcgcaaaatcgcggcgctgggcgagtggttcaacgtccgcagtgcctggcacgggcccggcgacgtctcgccggtcgggcacgccgccaacgcgcatctcgacctggcgatctggaacttcggaattcaggaagcggtcagcttcaacgacaagacgcgcgaggtttttcccggcgctcccacggtcgagaagggctacatgtacatcaacgatgctcccggatggggcgtggacatcgacgagaccctcgccgccaagttccccttgcccgagcatcccggctactgggaacccgtccgccgccccgacggcaccgccgtccgaccgtagttggccggcgttctctgcgtttacggcttggcgtatttgtcgcggttgcaggtgatcgtgccgtcgtggtattcgagctcggccgcttgcagcacggtgcggttggtgcggtagagcggatgatccggcgggtagtgcacgtggtaaaggataatgggtcggtcgccgagcaggatcacgccggggtggcctcccttggcatcgtccttgacacgtttgcccggatcgaagagcagaccgttgtcgaactgccaatcggtcaggccgtcctgcgagcgataggcccgtatgccgcgctgccccgcatccaccaccagccagtaggcgtcctgccacggccagacgaacggtgcttcgtggctgacgtcggtgaccgccggtcccacgaccgtccaatggtaaaggtcgtcgctttgggcgaggtaggaataggatccgtggacctcatccttgtagagcatgcaccaattgtcacccgcccgatagacgcaggcgtcgatgcaccggtccgaggacaggtcgagcgtggactgaaaggtccaggctctgccgtcagcgctggtgaagtgcttgatgaaccgcttgccgatccagtccttgtagatgccgtcgacccaggagacgtacatgtggtatagaccgttgtaatacaggatgccgggcgcccaccagctgcagttgttggcgatagggtcgccaaggccctgatcgccctgacacgtgccgaggtagcgccactgccgcccatccttcgacgccgcaatcccaatggccgagccgtggcagaactcgacgccctcgttcggttgaagggtcgcgcgccgctgggtgtagtagacccaccattcgcccgcctgctggttccagacgggagcgggatcggcggccccatcccagatcgggtcgctgaacagcggggctggggcattggccaggtcgaacattcgctcggttgcggcgtcgcacacgccgcacagtagagccgacagacaccaaccaacgagcactctgtttctcatgtgaaggtcctttcatcgatggtggcggcgccaggcagcccactgggcctccagaaagccccagccaatccctatgacggcgccgaccgcgtggcccacattcgcgacgctgccgagcaggcccgtcaggcacaggaagaaccagacgatcatcagcgtgacggtctgggggtgcagttcgagattggaggcgggatcgaatttgccctgcatccagatgtagccgagcagtccgtagaccacgcccgacatgccgccgaacgtcggtccgctgtagaggtattgcccgacattggacagcgcggaaacgaccagcaccagcgcgagcagccgccacgtgcccttgcgggtctcaaccatgctgccgaggtcccagagccacagcatgttgaagaagatgtgcagcaggtcgaagtggacgaatatgggagtgaacagccgccagacctgaccgtgccggacctcggacaggctggagtcccattgcacgtaatctccatccgcggagtagtgcgcgatggacaaatacgcaacgaggcggtcgttgtggcccagattggtcgccagcgtcacggccacactgacagcggccagcgtcatcgtcagaatcccgtagccgacgggaggtctgtagaaggcggttcggccttccacaaggcgcgcccgcctcggggcgctcgcctgcctgtcacggtgttgctgccgcgcgccctcgccggctccgaggacaaacatcgagtcatctggttgctggacgaaacgctcgaacagcgccgccgcctcttcgaggcgggattcgtcgaggacccagatgtcccagccgccgtcggaggccgggtcgacctgattctcgatccggcggctgtagaggaagtccccgaactgccttgcctgcgtctcgctttccagccggccgatctgtcgcattccgtgtccttgatcctgttgacatcgcaactgtgtgaacgattcacccgcgccgaccgctgtccgcccggtcccaggatggtatcgtctcgtctgccccgattccagccagaaccgaaggcggggactgcccgccgagtccagtctatttcggcagttctttgccgcagtgaggacagcatcgcggttgtttgcggcgttccatctcttcgacgaagccggccccgaggatgccggtgggaagggcgaacatgccgatcccgaggacggcgatgatcgcggccatgagtcgaccgatgacggttacgggaaggacatcgccgtagccgacggtggtcagcgtagtgacggcccaccacatggccatagggatgctcgagaagtggtcgggctgcgtctcgttctccgcgtaatacatcaggcacgaagaaatgaccagcaggatcagcaggatgaacacggtgctgatgagctgttccttcttggtcgcgacgacgcggccgagggtctgtagcgaatccgagtagcgtccgagcttcgccagccgcgcgatccgcatgatgcgcaggattctcagcatccgcagatcgatgttgacgaacggaagatagaagggcaggaccgccaacaggtcgaccaacgccagcggactgcgcgcgaaccgaagccgcccgaataccggatgagcataccgtggctcctcgacgcacgaccagatccggagcaggtactccaacgagaagacgatcacagagacgtactcgaacgccgtgaaagcgccatccatcgcttcgcggatcgaggcgacagactcgaagaccattgccgcgacgttcagcaggatcaacacgacgatcgcgacatcgaacacccggctgacggtgtcgcccggccgggcgaccgccacgatctcctgcacgcgtctgcgaacactcctgtacgaccaggctgccatatcgggcggatcatacctttgccttcgatacttcgtcaatacgatcagtgtcgtgctggaccgaatgggcctggtcgggtaacgtggatcagctcagatccgaagagcagaaaggcaagaggcatgaaggcgatgacccgacgcgatttcgtcaaggccgccggtctggcgggcgtggcagcacggacgtctccattcgcatgtgcccggacgatgggattggccgcgagcaggccgaacatcatcctggttatgaccgacgaccagggctatggcgagctggcctgccacggaaacccgatcatccaaacgcccaacctggaccgactgcacgcccagagcgttcgattcaccgatttccaggtcagcccgagaaacgcggcttcgacgaggtcttcatccacgggtccggcgggatcggccagacctaccccggcagttgcggtgacgctccgggcaacacgtacttcgacccggcgatcctgcacaacggcacgttcgtcaagaccgggggcttctgcgccgacgtctttttgagcgcgcgttcgactggatccgtcggcagtcgcaggcgctcgagcccttcttcgcctacattgtggaacgctccacacagtccctacgtttgtccggagtcataccagaagccatatctcgatgtgggtctggctgcggcctatgcggcgtattatggaatgatcaccaacattgacgataacttcggtcgcctgcttgccagactcgacgagtggaggctcagcgagcgaacgctgctgatcttcatgaccgacaacggccacgcgcggggcaatctctacaacgccggcatgcgatcgatgaagggcagtccgttcaaggaacgctactggcggcagttcggcggtggccccgacgagacgctcctcaaacaaatggacccgatgcgcacgatctgaacagcgcacgaggaccccgcgtccttgttgtcaaagacgacctttcccttgccgaggaccggtggtcgttgatttcggccggggcattccttatagtgggtccgctgccggcaaacgcaattcctgggaattggccatggaaaaggaaggcaaactgaaggaagccgtgctgtgggaacctgtcgaggacaggaaggttcgctgccatctctgcgcatttcggtgcctgatcggcgacggccggttggggcactgctgtgtacggcggaatgtgggcggcacgctgtattccctgaactacgacaaggtctgtgcggccaatcccgacccgatcgagaagaagcctctgttccatttccagccgggctcgaggagctattccatcgccacgatggggtgcaacttccagtgcgagttctgtcagaactggcagatcagccaggcggcgctcggaggcggcgaaattgacggccagcccctgaccgcccagcagatcgtcgccggggcactccgcagcggttgcaggagcattgcctacacatacaccgagccgaccgtgttcatggaactgtgcgccgattgcggccggctcgccaaggaaaagggtctggcgaacgtcttcgtcagcaatggctatatgacgcgcgaggcaatcgacttcgcgcgggattggctcgatgcgatcaacgtcgatctaaaggccttcagcgacgattactatcgccggctgtgcaaggcccggttgcagccggtgctggacacgatcgcctatatcgcgcgggacaccgatatttggattgaggttacgaccctgctgatcccgggcgcgaacgactcggaggaggaactgaagcagctggcggatttcctggttcgccaggcgggcccggatgtcccctggcacatcagccggttctacccccagtacaagtacaccgaggcgaacgtcacaccgatggaaagccttcagcgggcggagcgcatcggcaaagacgcggggcttcgctatgtttacctgggcaacgttccgggaacgcgttcggagagcaccttctgctacaggtgcggacgcctgctgatcgaacgcatgggctatcggatcgtggccaatgagattcaggattccaggtgtccgcagtgcggcacggagatagcaggttttgagctttgaggtttcatgaagatcgttgcagatgggaatatccctttcgttcgagagtgtttttcgtcggtgggtgacgtagaggtcctggggggccgtgacatgacgccggagacggttgcggacgccgatgcgttgctcgtgcggagcattacgcaggtcaacgagcgacttctctccggcagttcggtcaagttcgtcgccaccgcgacgatcggcttcgatcacgtcgatctcggctaccttgatgcgcacaacatcggctttgcctcggcgccgggctccaatgccaattccgctgccgagtacatcgtcgcggcgttgctcgagatcgcccgccggcacgcgatccggctcgatggccggtccatcggcgtcatcggcgtcggcaacgtcggcgggcgcgtcgccgccaagtgcgaggccctgggcatgcatgtgcggcgcaacgatccgcccctccagcgacgaaccggcgatccgaagtatgttcccatcgaggcgatcagcgactgcgatttcgtcacgttgcacacgcccctgacgcgggagggtcccgataagacctaccatctggccgacggcaggttcttctcccggctcaagcagggggcggtcttcctgaacgcctcacgcggcgcggtggtggattcacaggccctggcgacggcgatcgactcgcagcgtctgacggcggtcgccttggacgtctgggagaacgagccgaatatcgacgtgcgcctgcttgaaaaggtggatctgggctcgccacacatcgccgggtattccctggacgggaagatcgccggtctgatcatgatctatcaggctctttgcgagcacttcggcctcccgacgagattcgatgcgggcgatttcctgccggctcccgaggtccccacgatcgagctgcctggcgatgtcaccgacgaccaggcggccattgcgcttgctgtggagaaggtctacagcatcgtgcgggacgacgccaacctccgccagatcgccaacgaaccacccgaggcccgaggacggtttttcgatgccctgcgcaagaactacccggtgcgccgcgagttccacaacaccacggtcgttgtgccggagccggccggcgtgctgattcgcaagctgctggggatcggttttaaggtgaaagggcggcggcgtgaaggcgacgactgacggtctgcttcggtggccgggcggctctttggatttctccggtggctgtttgatcatgggcgtgctcaatgtcacccccgattcgttcagcgacggcggacagtttctggatgccgagagggcggttgcgcatggcctggagatggcctcccaaggagcggctatcatcgacgtcggtggcgaatcgacccggccgggcgccgcgtcggtgccgtcggccgagcagattcgtcgcgtaatcccggtgattgaatctctggtgcgtcagaccaaggtcccgatcagcatcgatacctgcgatgtggaagtggcgcgggcgtccctggcggccggagccaccattctcaacgatatcacggccctcgcggatgacaatatggcccggctggcggacgagtcgcaggtccttgtggtgctgatgcatatgcagggaacccccagaacgatgcagaccaacccgcagtacgaagaggtggtgggggaggtcctggatttcctggtcggtcgggcgaggcgggccgaggcgttcggcatcccgagcgagcggatctggatcgatccgggaatcggattcggcaagactctggagcacaacctgctcttgctcaagcagattggacgttttgtggcgacgggctaccgtgtgctggtgggtccgagccgcaagcgattcatcgggacaatcacgggtcgggagaagcccgccgatcgtgttttgggcacagcggcgacggtggccctttgtgccgcggcaggggtgtcaatcgttcgagtacacgatgttgcggcgatgcaggacgtgctcagggtcgtgcgagcggttcaggaatgcggagcggcaggctccaagcagggggcgatcaaacacgcagggtgaaagcatgcgcggggaagccggtcttcagacaggttgatcgtggacagagcaagcaaacctcagcacagggcgatatagctggcaatggccagaatgaggatgcgtctcttgctgatgatgaacggaagccaagtttcgtaataaaacctgctcatggttcgtttctgccccccaagaatccatcaatctcaacgaccgtattatagccgaaaccggggtaccagggcaagaaaaaaaggccgagatcgttcttaagtctttagagaaaatggttttgcgttctatcctttctccgcaacggttacgatgcgtagatgtgctgaaccgtctcgaaacgtcccatatcacgccgagcgggagactgccgatatgatccgaaaactcgcccccaggctgttcgcagggcagaccccggcagtccccagaaccgtgtgtagacggctgtcgtatattttgtttgacccgatgctgccatgcgattagagtggcaactatggcgttgtcgcctcccctaggtacgcgaagtaccgaaactgctgcggagggcaaagaatgactcaagaaccaacgttaggatgctatgccctatttcacacataggagcacgcagcaacgcacttaggagatgaccatgattgattcgacggaaaacgtcttggcttggatgcccggccagtgggagtggctggtcattctcgtcgttgcacttctgatcttcggcaggcgcctgccggaaatcgcacgcagcgtcggaaagagtctcaccgagttcaagaagggcatcaacgaagcgaaggagtcctccgacgatctggtcgatgacgtccgcaaggtcaaagacgatgttgtgaaggacgccaagaacgcttcgggcctgaacgacgccgacctgaaaagctgaccgccgcccgaccgggccccctcctgctctcgaccgagatgggcgctgccatgaagaaccaggatcccctaagctgcacaatgagtttaggcgatcacctcgaagagctccgcgcgcggctgatcctggcccttctcggcctggtgatcggctcggttattgccctgatcttcggcacgcatatcctgcggttcatcgagaggccctattatgacgccatgcgtggtcggctcaaggaaacggaagtgcctcgggtgcagtcggaaagcctcgccttgcttgatcagttcttcgcgacgctgacggagcgcctggcgtcggacccgaatgcgcccccgatcgatccgaaccgcgttgctttcatccgggacgtctctgtgaaggctgtcaaggcctggacggagcagaagtgcagcgccgccgagggcaaagcgcttccgctggatgcgcgcctccgggtcttggggatcccggaagccttcacggcctacatgaagatcgcattcatttcggggctgatcctgacctgcccatgggtgttctaccagctctggatgtttgtcgcggcggggctctatgaacacgagcggcggtacgtgcgccaggcggtgcctttctccgccgcgctgttcatcatcggagcgttgttcttcctgtttgttgtcgcgccgctgacgctgcgattcttcctggcgttcaacgatatcgtcggggtggcggccaactggaccctggagaagtacatttcctttgtgacgattctgatgcttgtcttcgggctggcttttcagacgcccattgcaatcttcatcctggtgcgtacgggcctggtcgcgctgaagactcttcgcgaggtgcgcaagtacgtcattctggtgacagtcatcgttgcggcggtggtcactcctccggacgtgatttcccagatcgcgctggccattccgctgtacgctctctacgaattgggcattgtgctgtcatacgtctcgcttcggaaggccgaaaagaagaaggacgccggcgccgcaccgccacaccgcgattagtcctcacgccagtggattcccaccgaaacgctgaccttgtcgattgggcatgagtacgccacctcgcgcccgtcaacagaaccgattccgaatcggcactgtatcttgtccggcagcgttggccggagatgtccgacagagaaacctccgatcgccggcagcgagtcgacagaatcgtgtcggattgcccgcagaccacgggctcgtttttctgcttcttttcctgtaacaaagtgcgttcgattgcgtcttataccatagacgcccacggcgaggtgtgggatgtgacacgcgtgtagtctcagacgagattccattgacacggggaagccagcgggagtacgaccatgtacaggcggagaatctgcgcatccatcgggacggtcctggcgttggcggcaggcgcctttgcgcaaatccaggtaaacggctacggcttacaacaccagacgcatccggcggtggccatgaacgacaacggccagtttgtggtggtttggcgcagtcacgcctccgacggccgaggagggggggtattcggtcggcggttcggcgccgacggggacgccctggacgacgagttcaggataaacctctccgaggtggacgtggacaactggacgccggcggtggcgatggccccttcgggtgagttcgtcgtcgcatgggtcgcggcacgggaaggcgaccgcaacgtggtgctgcgccgattcgatgccgagggagaggccctgacggaggaggtggcggtggcggatgctgcggatgtcgctgaatccgacccccagatcgcgatgaattcggcagggaccttcgtcgttgtttggaccaactggtacggggattcgtacaccggcaggagctatgcgacggtccgtctttacggacccgacgggttacctctggtcgaaccgtttagggtcagcgacgagccacagcagaaatggcctgatgtggcgattgacgaggcgggacgattcgttgtcacctggattcggatgggcgacacgtacaatcgcccctacggcgagtacatccggattcgccggttcgacgcggatgggacaccgttgggaccggagaagtcgttgacagacgacctgaacagccggtggtacggtccagcggtcgccaccggccgcgatggcgggttcgttgtgacctgggctatcggtcccttcccctacgacatctgcgcgcagccgttcgacgcggacgccgaaccggtgacgccgccttatctcgtcaacacctgcgtcgaaggcaaccagggacgtccctgcgtcgtgtcggacgggagcgaccggtttctgattctctgggactgccatgatccaagcggcaacggctgcactatacgcagccagctctgcaccggcgcgggcgaactggtgaatggcgaatcgactctgaaggttgaggacgcctctcgcaactggtatcccgatgcggcgatggcggctgacggtcgctacgtggtggtctggatcgcagagactgccgacggcgaaggctacgacgtctttgctcaggtgggggccctgcgatgatagagcaggatccgctcggcggcgcagacgtcggtcagttatggcaggcgagttgcttctgggacgctcgcgacaggtcgttgagcaggtacttgcggaccaccacgtcccagctcatgttataggccagacggtagccctcgcggatcatcgcgtcgagttcggcttcattccggggcaagcgctccaatatctccctcgcgagccgggccccttcggtggcttcaatgcgatcgcgcacctgccggttgatctggagcaggtcttcgatgtcatgatacgggtggttgcccaaggcggtgtagtcggccaggaggacatttctgacgggttgtccgccggttacgtcgcggacgaagccggcacagccgcagacgcctgtgagcacgcagagactgccgtaggtgagcggttcgagctgggcgatgccgaagggctcgtagatgctctggccgaactcgacgtcgctgccttttcggatgtcgaggaactccatgtcggccggcatgcggctgccgcaggatctgggatcgaagccgaattggttgatgaagatcgccttgacgtttctgctgcgggcattgaactgctggatcgccgtatgaaagtcggcttccccgccggacaggtccggccagccttcacgatgggcgacgggccacccgtaggttgattccatgcggtggatgtcacaactgcgccgtcgtgacacgtccgtgcccagcaggagatagacggctgtctgcccctgctgcctcagcgctgcatccatctcggacagcacgcgcaggtcgcgccagagccccttgctgcggaccagacgtgtcacgtgcgtgaaaacgtagtccggccggtaccccagaaggttctcgcagtaccgctggagcttgtctttggaggccagcttctcgcccacgcggatctcgtgggcgggaatgccgttgtagacgatgtcgatgtcggctgtctcgaactccggtgccaggaaacgcagttcgtcggccacgtagtccccgaccgcgtagatatggtcgcagtacttcgaggcctcgaccagcgagtgcttgaaatacgtggcctgattgccgaagacatcgctgacgtaaagccggtcacgatgggcgcgctccatgacgttgtagaacatcgtgtcgtgaccgggatgctcttccacgatgcggcgcatcgtggcgacctcgtgggcgtagaacaccgttcggaagttacagtacggctccagacgggccgcaagcacggtcggcattcccatgaactcatgcgagatgatggtggtccggccgtctgcggctcccagcgctttgagcaccgcgatggccggcagcgccagacgcacgtactgctcatactcccatagatgctcgtgcagatgactctggatgccgaattcctcgaagagacgtcgcttgaattcgttgagcatgccgcgatccatgtaccgcacgtcgatcaacaatacctcgggggtgctccgaaccccggtttgcttgtcgataaaggtgcgacgtccgtatacgatacccacgttgtaaagactctcaatccgaccgaaggcatggctgtagctggggtggatcaggccgtcgatcgaggagtacagcacctctccgtcctcccccaaccggtcctggaccgagccgtccgtggtaaacagcgggctgatgagcatggaacgaccgatggcgttcagataggaaggacaggtgaaaaagccctgcaggacggcgccgattccgccgatctttcccacggcttcgtgcgtgacatgcaccgcgatgctctcttcggccacgtgaggtctccccaagcgttagcgtacgtcgatccgagtgtacgaatccacatttaaaatgtacgccacggtcggggacgtgccaaacggcaccgtccgtgcgaggcaggcaggaacagggcccggaaaaaggcgaggggttctccggtcggcagacctcttttccggacgtatgagagggtcccagggtagcctaactgaggcgggtccgcaggttgcgaatcaagccggagaggacctgtggcgggatcccctgaaggcccgggtcggggggatcgctggtggacatctgatccaggatttccttggccttgcgacggttgctggcgatggtctcggcggtccgctgcgcgctgtccaggtcgccgtcggccatctgacgcagatagcggacgatagcttccgtcatcttctcgctggtgacgttctgcgtcggctgggcatgtatggcggcgtcgggaatctccttttcctggagaatgctctgggtgagctggaacgtctcggccagaagccgccgcttacgctcctcttccgtctcatcgatcggcgccagcttcagctcctcctcgtcgctttccaactgggggacgtagaccttgttgtggcaggcgggacacttgccccacttgccgccggcggtgtccggggcatcgatcttctttccgcagtgctcgcagtggaatttgatggacatgttcagacctcacacgaagcgattaaccctgcgcgcggtactcggccacgacatcggtggtgatgccgccccgcggcgtgaagcgggccgtcaccttcatccatcgcggtttgcacgcgccgctcagatcgtccaggatgtcgtttgtcaaagactcgtagaagatgccacggttccggtagccctgcaagtagaacttgagactcttcaattcgatgcagtaccggtcagggcagtattccacgacgatctccccgaagtccggctggcccgtctttgggcagacgctggtaaactccgggcagcgaatggtaatccggtactcgcgtccgggacgcggattgtcgaacatctcgattgtgccgggttcacccatgtcctgatccttgtcgcatgtctgccagtcagtatagcgcatcggtgcgaatgtgacaagcgggaatcggcccggatacgggaaaacggcctctcgacggcacgcgcggcaccctttgacagggccggtccgacgcgataccatgaccggtcgattgatcggagcaagacgtctgagtcgtgttctcaggagtgcaggtcgtgggaaaggacaaggctgttgtactgttgagcgggggattggattcggccacgacgctggcgatcgcccggcacgaggggtacgcctgctacgccctgacgttcctgtacggacagcgtcaccgacgagagaccgaggcggccaggaaggtctgcggcttgctcggagtcgttgagcatcgcatcgtgagaatcgacctggcggcctttggcggctcggctctgaccgacagcggcattgaggtgcccaaggatcgaggctctcttggggaagccacggacatccccgtgacatatgtgccggcgagaaacacgatcttcctcagctacgctctggcctgggcggaagtgctcggcgcgttcgacctgttcatcggagtcaactcgaccgattacagcggatatcccgactgccgggccgcgttcgtggccgcctacgaagcgatggccaacctggccaccgccgcagcggttgaaggaaagggccggtaccgaattcatacgcccatcatcgagatgaccaaggcccagatcatccgcacgggaatgcggctgggtgtggattacgccctgacgcatagttgctacgatccggacgcccaggggcgaagctgtggtcgatgcgacgcctgccggctgcggctgaaaggcttcgccgaggcggggctgagcgatccggccgtttacgtttctcctgaccggcaacagagtctctgatgcgcgtgaccgagacattccattcgttgcagggcgaagggatcctctgcgggacgccgagtgtgttcatccggctggccggctgtcccttgcgatgtcgctggtgcgatacaaagtatgcgtgggacttctcaaccggccaggagtgtgctccgaccgatctggtcgagacgatccggcggcattcctgcggccacgtggtgatcacaggaggtgagccgatggtcggcgctgacctcgccgccagggaaggactggcggagttgacgcagcgcctgcgaagcgaggggatgcatgtgaccatcgagacggcgggggggctgttcgtgcccgacctggcatgtgacttgatgagcatcagccccaagatggccaattcggtgccgtcgcagttggctgacgccgcgtctcatgaaagccagcgactggacgttgaagccctgaccgctctaatccaggcgtatcccagccaactcaaattcgtggtcgagaccgccgacgatgtccgggaggctcgcttgctggtggatcggctgccgtccgttccgtcggatcgtattctgctgatgcctcaggctcgaaccaggcaggagtttctggcaagggccccggcgattgccgcttggtgtgtggagacggggtatcgcttcggacaccgcctgcaggtgctgctgtggagtgaccgtcgcggcgtatagcgcgttgctgacgtggaccgtagcccctttttcccattctgcgcgaatcgcagttgacaagcgatcggccgtcgatgataatccggtttgtgttgcccgggtggcggaatttggcagacgcgccagcttgaggggctggtgggcttcggctcgtgctggttcgaatccagtcccgggcacttcctcctggaagtgttccctgtgagcaagatcagaccggatgtgttccggatgaggatgcggctttactcgaccgcgaactccttcttgcgggtgttcatctgggccttgagcctggcaacgatcgacgagtgcatctgcgagacacgagactcggacaggtccagcgtcgcaccgatctccttcatcgtcatctcttcgtagtaatacaggacgatgatgagtctttcggcacgagtcagtcccttcgtcaggaggttcttcaggtcgcgcttctgcgcttcgagcagagggtcttcgctgcggttgtccttgatgacgtcgatttcgtagacgtccttctccccgtccccgtcgccgcacttcgtgctcagggatacgagactggcggcattggcatcccgctggagacgaatgaactcatccatgtccatgttcagctcctctgccaactcgttctcgtcgggtttccgccccaggtgcatctccagcgtgtgcgtggcccgagccaattgatgggccctggcgcgcaccaggcgaggcacccagtccatgctgcgcaactcgtcgagaatcgatcccttgatgcgcggggcgcaataggtctcgaattttacgccccgggcgggatcgtaggcgtcgatggcgtccatcaggccgaagatgccggcgctgatgagatcatcgagctcgactttgtccgggagtttgctgtggagccgctcggcggcgtatttgaccagatctcggtaatgctccatgaggaggttgcgatagcaatcctgacgagtctcgtggaacagctcccacaccttgtcgatgtcgagcttcttctcgggcttcgtcgctgagtgtgtcttcacaggttgtctccgttacatgtcgcagccgcaatccgttttcgtcgtgctcacaagcctgtgggccgacatcgggtccggacggtccgccggctccgacaacgcccacactcacacctgtcattatcggccttggaggccgggactttaggtcagccactgaaagactctccggaaaaacgtcccgccatcggctcggcggcaatcgatgcccccgaggcgagccgccagcatgttgaacgagcaggcgatttgggacttcggataggccagtacgacgggctgacgggaccgtacggccgcacacagacgttcgtctttgagaaggaccccggcgtaatagaggtcggccttgaggaaccgggccgccacgtcggccagacgctggtaaatctgtcggccttcggcgatactctgggccatattgaccaccacacttatcggaccgtcgaaatgttttcggaccaggaccttgatcatgccgtaggcgtccgtcatggcggtcacctccggtgtggtcaccaccagcacgtgatcggccgccaggcagaaactgacgacggaattcgagattcccgcggcggtgtcgatcacgatcgtatcactggtatgttgcagtccggacagatgctgaagcaggcggcgctgttccgactcgctgatatcggcgagctggtccagacccgatgcgccgcagatgatctgcagaccttgggggccggcctggatgatgtcttccacgcgtttggatccgttgatcacatgggagatgttgtacttgctgcgaatgttcagcaggaggtccagattgcccagcgagatgtccgcatccagaagaaggacgcgcttctcggaggcggccatgcagagagcaaggttggtggcgatgtttgtcttgccgacgccgccctttccgctggtgaccgcgaggacacgggccaccggccgatcactgaccggcgtctgctgcagattgacggcttgattcgccatgattgcgggcattgccttcgagtcaatcggtggtttcacggggcgtcgaggagtcttcgagagggctgtcgggagccacgatctccacgatgggcagtcctgtcgggctccaaggggtgccacacttgagggccagcagttctctggcgatcttccgattcagggagttttccagaagcttgccgacctggagctcaatgtactcgtcgcggttctgttcgagcagcgctttggcgtgcagatccggctgcggacgaatctccatggtgctgttcgggccgaatcggatgttctccgtatcacagaacagcagacgctgattctgaaggtgctcggcaatcgcgccgttgagggcatgcacgaattccagcacgggcatatcctgtggtacgaatcccggcgtccgcgtattgtgcatgttctggtacaaaacggcacgacgaagctccgtgaagcggagaatcttcaggagcaactccgtcaggttgtcggggatgggaaactgcatatccatgagcactccttcgggaaggcggtctcaggcggtccgcaccgcgtggtgttgtaaagaagaggtgcactgggatggacaagtctggtgagggtcgacctcgtctggcgccgattggggggtactcacggagataaacccgtgtgcacggagcggacgcacacggaatggtattactcgcactgaagccggatgtctcatccttgatcctttcggtcttccttggacctccatgaagcggcgaacctccatggggtgttgacacgtgcttggaacgcggcgatctatgacaagcccctatgttgcttcgggcgacataaagtttcctcccgaggacgaggcattgcccggcggggcggcctcaatctgcccggaccggtgactgtcgtcgaagtgtatcgctctctgcgtccgctcctcttcgttcagcgtgcgacggatctcgctgagactcatgttctccctcagttccatgattcgcgaaagacggtcgaataccgattcatcgtagaggcggtgtccgccttcggtccattccgcttcgcgaatcagccccatgatggtgtagttgtgaatcgtctgtcgggagaagggactggatcggaccacttcgccgatccgatagcgtttggcgggaatctgcagccttcgactcactttctgccaactcatggttgcgatccgggattgaactgatgccggcacgggagccggagcgattcgacaaagtccgacaatggcgaggcgaccgcccatcgtgcggcagggatgatacaggtatcttgttcagcacaactacgcatgacaccacacccgaaagaaacaagagcattacgaaccgggcaaaccatccttccgaggtggcctcccgctccggagcatcgtcagatataccagccacggtatcgcgccacctgccgccacagacgacttcacgcctgacaacctgcccatgtcacagccgaacgccttgcgcccgtctgtggcgaccacagagaacgcattttacattttgcaaaatgtaaaagtcccttatcggcctgtcaactggttttgggatttttcaggaaaaatcttcggatggctcgatcccggcgtgatgggcctttgcggataccgggcccgctgccatcctaaggccctataacatgaggaaatgcggactcttagactgcgacgacgggctccgtttcacctccgaagcctgccacgagccctttcatagttttctgcaaacaggccgtggagaattggacgataagaggcggtgtaagtccaaagccataatctctactgaatcggggtgctattgtctgcccatgaccgaacgaatcgaccaatcgaacgaccacaaagacgatccctcggctcaccactcgctgctggagcgggtcacaccgctggcgcgacagatcaacagcctggacatggaccggatcgccaatgtctgtgtcacgaagatccccgcgatcgtcggatcgacctttgcgtctttgtatatcctggatgagtcgaaccatattctgcatctggtccgctgcaaccatccgtttcccatcaacaagatcgtgtccctcaatcagacgccaccgtcccccatggtcgtggcggtcaagagcaaggaactgatcctgaccggtgacatcgacacgtacaacagaccgatcatcaagcggtcgcaacgggcctttgcggagaactacacgacgaccaactgcgcgatcgtgcctttgatctgtcacgacggcgtcgtcggcgtcctgaatctggcggacaaagcaccacctgtcgccttcacgcgggaagacatcgcgttgatcgagttgctggggcagttgatcggcgcttcgatcggcaacatcaagctgttcgagaagatgcagcgacaagccatgttggacggtctgacgggcttgatgaaccaccggaccttctatgaggctctggaacgggagctgtggcgttcgcgccgctacggcggtacaatctcgatgatcatggcggacatcgacaatctcaaagctatcaacgatacctacggccaccgtgcaggcgacaaggtcatacgcgaaatcagccgcaggatcaaggagtgcatccgccagattgatctggcagcccgatatgggggcgacgagtttggggtcatcctgccgaatacgtcgctggaagaggccaccctggtctcacagcgcatcgtcgatgccgtcgcttcctcttgtgtgttctggcaaagtgttcgcatcccgctatcgatcagcgttggtgtcggccagtatgacgccgacgccaatccggaggatatcaccagtcgatccgaccgagctctctacagagccaagcaatcgggcaagaacaccgtctgggtgttcggatctggcgagaaggagtgattgtctggggtgtcggcgcgcgattgcctccgtcagcacgggtcccggagccagccaagcggccggctccggcggcgggtgtactcgatagtggtccgccgccgggccggatgcgattctgacggttgccgaccggtaccggcccttgtcatgcatgccagaaggctacggcgcccaacagttgggataactccccgcgccgcaactgtagtgatagtaggacacgcagccgcagttattccagtgccatgaccagtaccagttcaggttaagacacggattggggcagggattcggacacgggttcgggcatgggtccggacacgggttcggacatggattcaggttcggacatggattcaggttcggacatggattcaggttcggacatggattcgggttcggacatggattcgggttcggacatggattcggctgtgggcacggacacgggtcaggattagggcacgggtttggacacaggtcccagttcgaccagtggcagacgctcatgtaggagctcgagtaatacatgccgacatgatatccccacgccggcgtgctggatgccagaacgagcaggagcaacagggcatacttcttcataggaaacctccttgtgacaatacggtgttcctggccgcgcgaatctctccgtagaccggcgcgggtgagtgcgattcctgcgcactcgatcagtccgatcggaacgcaagctccgaacgggagacatttcgtgcatgtggtggcggttcatggatcgccagcgccgaccagtcgccgaacagcatgcccgtcccgacaacgatacgccgccggcctgatcgagcgaaggaagaatggtggccagtccacaccatgacagtccaacggattgggtcgcggcccgagcaggttaccagagacgccgctcagacggcggatcccagccgtgggctatgcgacgggcccacggctgggccgaatctgcatgccatgctctcgccaatgcccatatcccttgcgtaaagcgtctcgacgatcacctcggtgtgtaggtgacaatgccccataccgggccgccatagacgtggtggtcgccgaaacttccaaagcaactccaatcgatgcagccgacttggccttgcctggaccaggccccttggtagctgtcgacacccatgacgcggaccggggtcatcgggctgctgtagagcaggccggcctgacccgcgaagttgccgatgacgacggcccctggactgggacagggcgtcggacacggactgggggacgggcagcacagcggtgtgccgttggcactgccgctccagtttccaatgccaaatccccacgcactggtgctcatcgcgagcaccgccagtaccaatacgcacttcttcatcctttacctccttgtaaactgactttccttttcatcagagcacgaccctctccggaaggtcgctccgtccggacgcacctgaaccatccatgcgggtgcgcatagaatgcgattcgttcctgactacccttttgcgtggagacaaaacgcgtacgaaaacaggagtggtggagaaatgtggcccattcagcatccctgcctccgtgcccacgtatcgactccaaccgatactggtcctgtttctacaccggcggcgggcggttgtcaagagaaatctggatgttctatgcgacaattcgcttgtatagggcggcacgtgcaggccggcggtctttatgtggctttccgatcggtgtggattgtgataatctgggcgaggtccaatctctcgtgccgcagttgacaggacggcgcaaggccagtctgcatggggcatgcgagtagggggatggcagaggaactacacatcgcagacgcggcgatgaggcggttcggctgccggcggagaacaaggaactgggaatggaatgaacgataacacgatccatgaggattgcacacgaggtggtcagaaccgtcctgacttgcggcagacggcccatcggccccggcggcttctggtgttcggggggatcgctctgctactcggtctggcaggcctgagagtgcttcgtcaattggcttacgcacccccgtccgtcgacggtacctacgagtggaccctccgttttccgggtccctcgccgggagccacgttcaagaccgctccgggtgacgatgtccgcaagatgcttgacaccctgctggtcgatgccggggcggattgggccggcgctctggagcagaccgggacggtgcggatcgagttgtcccacctcagcgcgactccgcttggcgttcgcctgctgtggcgattctggggaccgaaaggatcgcccccgcccgaccggatcgggcgttcgctgctgacgatggaggtgcggcaaacgtcaaaggcacccctccgatatgagttggtgcaccttggcacgggcggaaccgagacggtgaccggtgcattcgacggctacccgcatgttgaggatgcgatcctcgacgatctggccagagtgatggagtccattcaggcgggtcatgcggcggggtgaaccgggccgtcgtcacaagacgatgcctgcgagtgtacggccacgcatgtttcttcagaaaggagtgatccatgagagatgccggggatgtgaaggccagccgtgcggcggtcgcggttctgctggtggcgatgctcatgtccgcgagcgctgcttcgcagcgtctgcgcgttgccgaaggggggcgctacatcgagtacgacgacggccggccgttcttctatcttggcgataccgcgtgggagttgttccatcgtctcaaccgggaagaggcggatcgctacctggccaaccgcgccgccaagggcttcacagtcattcaggcggtagtcgtcgcccagttgggtggtctgacggacccgaatccgtatggcgatctgccgctggtggagaaagacccgacacggcccaacgaggcctacttcgagcacgtcgactacatcgtcaacaaggcgaacgaggcgggtctggtcgtcgggatgctgccgacgtggggcagctattggaaagtgggatcgggcatcttcaacgccgagaacgcgaaggtctatggacgcttcctcgggcggcgatacaaagacaagtcgatcatctggattctcggtggcgacgagaacattcgcaacgacaccgagcgagccaccgtcgaggcgatggcgctgggccttcgcgagggggacgggggagcccatctgatcacgtaccacccgcgcgggccgggtctgtcttcggactacttccaccgagccgactggctggacttcaacatgttccaatcgtcccacgcggcacgggaccacgacaacggcctgttcacggatcacgattacctgctggagccggtcaagcccaccctcgacggtgagcctcgatacgagatgctatcggtgggattctacaacgccaatgaggcgcgcaacgttcgtttcgatgcatacgatgtgcggcaggcggcctattggtcactgctggccggcgcgtgcgggcacacgtacggacacagcagtatctggcagatgtggcagcccggacgcgcgcccgtcctctgggccaacgtcccatggttcgaatcactggaccatcccggtgcctttcagatgggcctgattcgcaagctgttcgaatcgcgtccgttccgcaagctccggccggcgccgtcgatcctcgtcaatgctccggatacgggaggcgccaaggtccgcgcggcactcgcctgcgacgggtcattcgccttcatctattcgccacggggcgagccgttcatggtgcacctgagcgccatccgcgccacccgtgtgaaggcgacgtggttcgatccccgctatgggatcgccgagccgttgcacaccagcgacaacgtgggctttcagacgttcgtgccgccgacttccggacgcggctgcgattgggtcctggttctcgacgacgaagccgcgaaggtcccgccgccgggccggccggagtgaggaacgatgcctgcgatggactatgagcgggtcgcccgcttctacgacagctacgtccagacggacatggatgtcccatttttcctgcgggaagcgaagagggccggcggtgcagtcctggagttgacggctggcaccggacgtgtctcgattcccttgctgttggccgggaccgacctgacgtgtgtggaggactacgatcccgtgtccaaatcggtgagcggcagccagttctacgacgttcggtgctgggatggctctcttccggccgccatgactgtggacctccattcctgtctgcactcgcactacgacttccaatcgctggcggaagcagcgggtttcgtcccggtccatctatacggggactactctatggtcccttcgagccccagacgagtcccttcatggtctgggtcctgcgcaaggcacgagcggagacggtttgatatggccgagcagcgatatccggaaccgacggtcggggcgttgatcttcaacgcccagcgccagctctttctgatgcgctcgcacaagtggcggggcaagtgggtcgttcccggcgggcacatcgagctgggcgagacaatggaacaggccctgcgccgcgagatccgcgaggagaccaacctggagattcgcgacatcgagttcgtctgcttccaggagttcattcacgatgaccggttctggcgacgccggcactttatcttcttcgatttcgcctgcaggaccgattcggcggaggtgattctcaacgacgaggcgcaggacttcatctggatcgacctcgaccggatcggcgaattgccggtggagcactatacccgcgtcgccatcgacaagtaccgcgagcgaaaccgccggtgaccaggctggtcatggacttgccggggccgtgactcccacatcgcaaaggagtggacgattctgaccgtgggtgctataaagacggtcggcgtcaccgtgtggcccactggaagcgcttgcaggccgcctgtgacggcggaatgtttcgcggggacgcactttgcgagagggagtgtgaacgatggaaccagcttctgggaatcgatggcgacgccagcgtcgcaatgcgctcgtgtttctgtatgcggcctttcttctcatgggtgcactgagcggactgctctgtttctcggccgacgagggtgcttcccttcgtgtccagttactgtttgccattgcggtctcgctcgggttcatgtggtactgcacggccgatgcaaggctcctgggtaagccactcctgccattggccagggtcggcatcttcgcgttctggccggccggcgtacccatctacctgctctgggcgcgccggctcagagggctgggcatcctgctcctgcacggcatctcgttgctgttgaccttcgtggctgcattcctggcgacggcgtacctggtctacggcgaaaggcttctcggctgagtcttcgccggcagatgctgtacatgtggtgtgtgccgcctgtatgatacaggcgtgatcgagcacgaaggagtggcctatggatcgggtgcggcggtgtcttatctggattctgttcggctgtggaatcgtggcggcttctcccgtgccgggtgacgtgggctatgccggccggcagggtgtgactctctatgtctcggaggtgggggacaactccgatggactgatctgggcgcgtgcgttccgcacgatccaggcggcgttgaacgccgtgcccgacgacggcgggggccatcgggtgatcgtccggccggaccactacatggagcccaacctcgagacgccgcacaagggcgcgccgggcgcctacaatctcctgattggcgatgtcgatgggcgtctcggttcgggcgcgcagggttgggttgtgatcgacgcgggcctgttctgggacctgacgcacgagagcggcgcgggcttcaccgtcctggtcgaggactgccggatgatcgtactgaacttctctcagccgatgatcagtccttcgacgggaatcatctgctccgagcggaatccgcaattactgcacgtcgatctgaaggactgcattctggccggctatcaggtcttcggcaccggcggccatgacgagaagatttcctacaagacggagggtcgcgtacaggcctatttgcagttcgagcagaccgctcccgccggcttcgagcgtctgggcgcctggccgatagagctgttcttccgcatcgcaccgccgcaggtgagaaacggtgttatcgactggcccgcatggcgttagaagtgtgcactcgtgaagtccggaggattgcaaccgcaagtatggatcaggatatggcgtgaaagcgaggtgtgaggatgtcaagccgttgccgtaacagacaggctcgtattctgagtcgatacagggccgtgacgtgcgtgtgcgtctttgtgatgagtgttgcacccgtggcggtggtgcgcgcggcagacctggtgttcacgcatttcacgattgccgatccgttgcccggctcggcgtgggggacgggcggcagcccgctggccgactatgacggcgacggcgatctggacgtggtcatctcgcggcgcgagccgaagaccgcctactggttcgagcggaaggacgacgcgaactgggtccgccacgtcatgggttcggccgagggcctggccaataccctgggcgcggcggcgctggacatcaatgacgacggttggctcgatgtggtcctgacaaacgtatggtttgagaaccccggtggtctgctggagaaccctgacacgccttggccggcccacgacttcgccggcgggggacacgatatcgtcgccgccgacatcaacggcgacggccggctcgacatcgtcacgtatcacggcacggtcgtctcgtggtacgacccggccgacggcatgaagcagaccgacgtaggacagggcgaggagaaccacggtggtatcgcccccaacggcatcggcgatctcgacggcgacggcgacctcgatatcgtcatcccggcctactggttcgagaatcccggcaacacgtcccgcccctggcggcgatacgaatggccccatctggcggtgcccaacgcgtcctacgggaccagcatgcgctcctggatcgtcgatctcaacggcgacgggcgcaacgacatcgtgtacagcgactgcgacaccggctggtcgcacgtctactgggtcgaggacaccggcaaacgaccccgctggcaacgccatcttctcgatgacccgcccacgcagccgggcgatgtgccggggaccggctcgtttcactcgctcggcgtcgcggacttcgacggcgacggcgatctcgacgtcttcgccggcgagcaggaagatcccgacacctatatggaatccagcggcaagctggccatgaagcccaagggtctgaaggaacgcggcgtgatctggctcagttccggcggatggagtccgacgtttacgcctgtcgtgctgcacgtcgacaatcccggctggcacgacgccacgctgggcgacgttgaccgcgatggggacatcgacatcgtcacgaagatatggaacaaggacggcgcgacctatcacgccgactactggcgcaacgacacgccgagatagaccatcgccgtctgttcgtcacgtggacgacgtgagcttgggcctgcgcgccagaagccacatctgacgcagcttgctgcgcagaacacgacacagggagaaacggatcggagccagcgtcggcagctcgaaatccgagcatggttcgcccggtggatcgcccaccagttcgatccggtcgagatccagaccgtcaaactgcatccggctcgcggcgcggaggagggggacctgcccgggattgatgccgagcagccgacagcacacggtctcgcacgagagcggatcggtgcctccgatcagccagccgaggggcttgctgacgcccctcgacggacctgttcgctccatcgcgacgatgccatcgatgagcgtcagtgccggccggaggaagtagcagatatcgatcagcagtctgcagaatctcgcagagtcgcctccgtatcggtaatgccacagtgccttgcgcttgccgctgacgcatccgaacatgttcttgactgccagggtcacgaggagctgaccgtgggccttgagcttcggcaggttgataatgacatcggcctccagcgccaccgcgctgagcccgactcgcggaccgccttcgcggacacgccgcatagtcggccggtccagttgtcgcagaggcacacccagtctcttcaacggctcgaccaactgcagcgcctcggcgcaactctgcacgtctccccatccgggtgaatcccccacaaagggcctggccccgaagtccttcagaaaccgtgcggcagccagaatcaccgcgggatgggtctgtgtcgcgtcttgtcgatgcgaccgtggggcgatgaagttcggcttgagtagaaccctgtcaccgggcttaacgaatcgttcaatgcccccgagcagccggaaatgacgctcgatggcttcggcaaccctttcgggttcatagtcccggcatcgaaccagcgaaacgacagtcctgtcggccatggtcaatcagtcattgatgcgcgtacagaccagaacgaatacgcgaaaggccggacggcgtttcggtggctctttcgcctccgcgtggaagaacagcaccggttccggtcgattgaagaaccgcccgcccagagtgagggtctcgcccgaatagctgtcgggcgccagcacgagcaggtcgcccggtgtcatctgggcggcgaatgccgccgagtcgaagtagaactcccgtcggcgattctgttcttccagctccggaatcgcgctggtcaaggcgagcgtatatacgggatacgcgatgattttccgcacgccgcgtgcgccgggaatcgcctgctcgcgaagccgcagcaccagcagaccggggccagcttccaccgtctgagcggacaaatccgttccgacgaagtgaatccggctgttcggggaaacaccggccacgggaaggtcggcgggttcgtcgttgccgatcaccagtgaggtggttccggcatcctgggccccggctgccgccagcagatcccgaacctgctcccacatcgtcgtgcgtcccatgcgcacacggaaggagttgcccgcaaaggcactgtagctgttggtctggatcggcttggccgagagtgtctgccagagatcgtcgagcttgcggatgttctcggccggcatgtccagggcatagatgtcgaggttgaccgtcgccaggaattgcgcccggcgcgacggatcgggcgactggggtgccagttcgccgatcttgacctgctcccagattggcaccaccggctcggacgactccttgcagccgcccagactcagccaggatagaatcgccagcaggatgatccgcagggcacgcatggcgggtagcctacccgtgcggccaccccttgtcaacgtccctggatttcgattgaccctccatgctgccgattgataggatactatgcgagcacagggcagacgtcacggccagatgtacgcagcagattccaacgcgccatgaggaggttcggtcatgtccagacagacacatcatgtgaacagcagcagtcttggtggcacctcgcggtttgtggtatgggtcggcgcatcgcttctgctcctgccgctcgcggcggtccgggcgcaagacccgacccgcttcgaagccgacatccaggcgttcgagcggatggacgcgaccacgcctcctccgaagaagccggtgctgttcgtcggttcctcgagcattcggatgtggaccacgctgacggcggacttccccgactacccggtgatgaatcgcggcttcggcggttcgtacatgagcgatctattgtactatttcgaccgcgtcgtcgctgtctacgacccggctctgatcctggtctatgagggcgacaatgacctgtccggcggaaagtccgtggaccaggtctacggtgagtatctgcagtttgtcgcgcgggtcgaggcgcagttgccgcaggcggatgtcgccttcatcgccaccaagccgagcccgagccgggcccagtatgtggaggtcacgcggcagttgaacgagcgtctggaggctctggccgcgaccgatgcgcgcctgtggttcatcgatgtgttcaccccgatgctcaacgaaaagggccagcctcgtccggaactgttcggcagcgacatgctccacatgaacgccgccggctacgagctgtggcggtcgatcatagagccggtgctggcggcgtgggccatgcccaaggtacaggtcctgctcatcgatttcggtgcgtcgggcacgcccacacagaacggtccgtcgccggacgatccgctgagtttctggaacaatgtgaccgaagccgtcggcggtgtggcgggtgggcatctttccggcctggtcaataccctgaacatgccgacgtcgatcggtctggagattctcagtccgttcaacggcagcggcccgaacaccaacgggaccctcgaatcgaccgtcttcccggcgaacgccacatgcgattcgctctatggcaacaccgagacctggggcgggctggccaacgtgacgccccgcttcaagttgacgggcctcaatcccgaacgggtgtacaacttcaccttctacgggtcgcgtctgggtgtcaccgacgtccgtgagacgagctatacggtcgcaggcgaaggaaccacgttcgtgacgctcgatcccgccaacaacgtcgacaaggtcgcgacggcgctgggcattgtgccggacgcgatgcatgagatcaccatccatctggccccgacggcgaacaacaataacggatatcactttgtctatctcggcgtaatgaaggtcgaggaaatccccgagcagcagccgatcgttttcatccggcagcctgccagccagacggtggtggcctaccagtccgccacgttccaggtggaagtccagagcacgccgccctatgtcgtccagtggtacaagaacggcggcgcgatcgccgacgccaacgagttcacgtacacgatcgacattgtgacgccggacatggacggcgccgtgttcacggtgggcgtcagcaacatggtctacagcgccctgagcgaaggcgcggttcttcgcgtgatccccgacgtcaacgcaccggttctgctgtcggcccagagcaccaacggctacacgattacactgtccttcgacgaacggattgacccggaaacggccgccgtggcgcagaactacagcgtcaacgagggggccgttgcggtccttgccgccgaacaggctgccgatggccgcaccgtcatcctgacgctggagcagcgcgttctgggccgcttcacggtgagtgtcggcggcttgcgggatctggcgggcaatgagatcgccggcggggccacggtggcagggcaggtgcgtccggaggttcttctggtcgatttcggcgcctcggatactcccacgaacgacgatccgaccaacgcgtggaacaacgtgacgcagagcgtcgggtgcgtggacggcggtcgcctggccgctctggtgactgtcgagcacattccgacaaaggtcgatctggtcatcatccggcggttcaacggggccaacaccaacgggacgctcgcctcagcggtctttcccgcgaacgcgacgcgcgattcattgttcggcaacaccgagacgttcagcggcctggccgatgtgttcccgagcttcaaactgacgggactcgaccggttgctgacgtatgatttcacgttctatgcctcacgcatgggcgttcgggacaaccgcgaaaccggctacacggtcgccggcgccaacgcgggctttgtcgccctggacccgtcgggcaacgagaatgcgttcgtgatggtgaccgggatcgctccggatgacgccggcgaaattcgaatcgatctggccccgacggccaacaacgtcaactccaaccactttacctacctcggcgtcatgaaggtcgagccgacgccggccaagtaacggcagaatcccgtggcccctctcgaccccagccgggaggggccgttccttccatcggaccggcagggcgggttcgcaacctgcgcgtccttttttcgcctccttacgccaaccgtattggctctgcggcagccaatcaccgggtcgggaattcgcttgactcagggatggttttgggtctaatgagccgccgattattcagaatgaaactccatcagaaagggtgctttgacgatgaagatcagccagagagccaggagcgttcccccttcggcgacgatcgccgtgacggcccgggccaaggaactgaaggcccagggggtcgatgtggtcggttttggggcgggcgagccggatttcgatacgccggagtatatcaaagaagccgcgatcaaggccctgaaagaaggcaagaccaagtacacgcccgccgcgggcatcattgagctgcggactacgatcgccaagaagctcgaacgggaaaacgggctcaagtacactcccgagcagatcgtggtcaacatcggcggcaagcactcggtctacgaggcgatgcaggcggtgctcgatccgggcgacgaggtgctgctgccccggccctactgggtgacgtatccggaggcgatcaagctggccggcgcggtgacgaagatcatcgagacggacaaagccaacggctacaaaatcacgccgcagcaactccggaaggccatcacgcccaagaccgcgatgctgatcctcaactcgcccagcaaccccggcgggttcatgtacacgcccgatgagctgcgggcgttggccaaggtgctcgaaggcaccaacatctgcgtgatgtccgacgaaatctacgagaagctcgtctacggcgactcgaagttcgtcagtttcgcggccctgagcgacgacgcgttccaaaggacgctgaccctcaacggcctgagcaaggcgttctccatgaccggctggcgtctgggctacaccgccggaccgctggacgtcatcaaggcgatgtcccgcctccaggaccacatgacctcgaacccggtgacgttcgcccagtatgcggccattgctgccttcgggccgcaggcggaggaaacgatcgagaagatgcgggtcgagttcgccaaacgcggcaagtacatggccgagcgactcaatgccattaagggcgtccgatgtgccgagccggcgggcgcgttctactgcttcccggacgtttccgcgcacttcggccggaccatcggcggcgtcaagatcggcgacagcatgcaattcgcctcggccctcctcgagcaggccaacgtggccttggttccgggcctgccgttcggctgcggcgacaatgtgcgtctgagcttcgcctgttcgatggagcacatcaagaagggcctcgaccgcctggaaaagtggctgagccagtaacacaggcagtcggcacagcgtcaggcagtacgaggccgaccggcgcagcggccggctgggcggcacggcatgcgcgggcgcgcacgtgaatcttgttcgcatacagtcttcggcaaaccgcaacaggacagcgggggttcttgacgatatacggaagaagcagtattcttctacgatactatcagccgaaacctgttggaaagtgcgcgaatggcggcaaatgagaccggcgagggggacatactgttgacggccgaaggacgctcggcatggtccgtgtgcgtggcggtcgccggctggctggcgatgctggtcttcgcctttcacgcctgtacgcacatggtggccgccggcgacacctgggtggcgatggcgtgcggacggcactttgttaatcacggcgtcgataccgtcgagcctttcagcgccaacagccaccgcgccggcccgaccgaggccgaggtcgcgacttggccgggctgggcccgctggatcaccgagaaggtgggcctcgaaacggttcgcaagtggcatccgaccggctggatcaaccagaactggctgacgcacgtcatcttttatcgcctgaccaccctgttcggttcggagcaggagccgtacttcgacgcgctggtgttctggaagttcgctgtgtatttcctggcggttgccgcaatctacgtcaccgcccggctgctgggcgtagaccctgccctggccgctgccgcctccggtttcgcgctgttcgtcggacggtccttcttcgacatccgcccggccggcttctcgaacctgctggtggcggtcttcatcctgattctggcactgaccagttacaggaacgcgctctacatctggctgatcgtgccggtggtggtcttctggtccaacgtgcacggcggctatatctacgccttcatcgtactcgtcccgttcatgggctggcacataatcctgcaccttccgaagcgctggctggtggcggtctacagcattctcacctggctggttctctatggcctgacccatcagtttctcggtcgtcgggctgaactggtggccgagtatttctcacagagcaacgcgggcgctgtcggtatcggcgactggatgattgtcctcctggtgctggccatcggtggcagcattgcggcggtttcgcatcggcagatcggcgaccgcgcgttgacggctttgcacggcgtagcgacgtgtgtggtgttccttctggtgttggtgcggtacttcccggcgccgcccaacacaatgaacgaacgtattctgaagatctttgcggatcacgcggccgggggacgctggacgtgcgtcggtatgttcgttctgtccatggcgttcggtgcggcggtgctggcggtaagagagaagggcattcgcgtgttggatcgccggacccttctgcacacgctcggcgccggagcggtcgcgttcgtcgcgatggtcgtgttcaatccgttccacctgacgaacctgacgcacacctttgtgatctcggtcagcaagcacgcggaacgttggcgcgacgtgcacgagtggcatcgggctctggactggacgaacccggttggtaccgccattccgtttctgacaatgtacattttcgcctggctcgctctgctggtctgggccgtcctgtcggtgcggatggcgctggccgaacaatacccgaagaagcgcggcgggaaggccgaggcgcccgccgaagcctcgatcgacgtcgttttcattattgtggctgcgctgaccgtctatatggcgctgcggtcccggcgattcatccccattgccgcttttgctgcctgtccagtgatcgcgttgctggtgcagcggatcgtggccgccatcctgaccctggcggacctgcgtggtgccgctcggctgcccgatccggctcgggatgagctcgtcgaacgcctgcttctgctcgggctggcgggggcgctggccgtcctggggttgtggcgtctgctcttctggcgctggctgttcttcccggtgccgggtgcgcccacgcagattcagccgcgtttctggctgctggcgttcggaacgctcttggccttctcgtcatttccgctggttaccgtgttctgcggaactgacaaatccgcgggaggtaccagacaggcgggcgccttggcgttcctcaagcgggcctggcaggttgccgccctgatggtcttggcgtctgtcatgggttttggcctgtgggtagggctgaggttcaagctgatctacctggattactggccggcggacccgaagctgacgtcggtcttcatgcggatgaccgcctccgatgccaagccgttctatgcctgtcaattcatccgcgagaacaagctctcgggcaacatgttcaactactggaccgaaggcgggttcatcgcctggggtcaggaccccgatcccaacacaggacggacgcccctgcaactcttcatggatggccgggcccaggccgcctacgacacccggacgttcgacctctggacggagatcctggcgggcgggccggccgccagaagggccgcgtacgagggacgggacccgaccgccgccgagctgagagagatcgggcagtgggtgaccgagcaactcaacaagtttgacgtctgggtggtcctgatgccggccaaccagttcgacaaggatttcgtccgcgccctcgaatacgatcccaactggcgtctggtcttcctcaacaacaagcagaaactgtttgtcaacgtgacgaccgagcggggcaaggagttgttcggaggcatgtttaccggccggaccacgtatccggacgagttcaccgccaacttctccgtcgggcacaaccttctattgtctgccgaggccagccagagacagcagggtctggacatggtcatcaaggcgttccatctcgatccatcgccgggccccatgctggacctgctggtgattgccgcgcgctatcccgaactccagcagcgggtcaacgagatctgcgtcgagtacaccacgcaattcgagaagaacaagtccagctacgccaatcacgatggctacaatctccggctggaagcggcgcgcctggcgatggtgcggctcaagcaggtcgccgaggcccaaggcaaccgccaagtcgcccagacctgcgagaaccagatgaaacgctatctgatcgaaagagacctcatttccgacaggaagaggtggtaagcgatggcccaggcggacaggcggacgtcgtcgggtgagcaggcgcagtcggccgtgtcgatctcggtcttttttccctgctacaacgagcaggccaacgtggcgcgggtggccgagcaggcggttcgtgtgctcgaagggctgggcgccgactacgagatcatcatcgtggacgacggcagcgtcgacgagaccggacgcattgccgacgagatggccgccggcaacgatcggattcgtgtcatccaccatccgcgtaacctcggctacggcgccgcccttcagtcggggttccgcgccgcgcgcaagaagctggtcttctacacggacggcgacggccagttcgacatcggcgagatgccggcgctgctgccgctgatgaacgagtacgatatcgtcagttgctaccgcatgaaccgtcaggataacatcgtccgcagaatcaacgggtggctctggacaaaggtcaccggtctgttattctcgctgaaggttcgcgatgtggattgcgcctttaagctgtatcggcgttccctcttcgaccggatcaagatggaaagcaccggggcgctgatcgacacagagattctggcacgggccgcccggaaagggtatacgattacgcagagaggagtacatcactatccgcggacggccggtcggcagaccggagccagcctccgtgtggttctcagagccttcaaggaactctggcaactgcgtcggcgcatcgtacaggaaccatgaggggatgacgcggctctccggcgcaggccaggcagtctatgcacagacgaaaagccaacctctttatctacggatcgcttcgagacagtcgcatcttcaagtcggtcagcggttttgccttcacgcgcaagccctcgaagatcgacgtcaaaacgctgtttgccgagccggcttttctcccgggtcatcgacgggtcagcccggataacgtgtatttctacgccgtcaaggctcccgacgcgagaatcgaagggtttgtgatccatgatgtgcctctctcggcattggccgaaatcgaccggtacgagggcaaacgctaccagagggagacggtccacgtctataccgcacacggcaaggttgaagcccaggcctatctcgtgaccgccgaatcgatgcggaaacgcttcggcgaccggtttcacgtcaatctcatccacgagttgtggctccgcaagcggatcaaccggtttctccagaagcacacgcgtcccggcgagcggaccgtcgatgccgaactggaacgtcaggccgaacgcgagttgctggccacgaccgagcgtgacctggtcatgagccactaccataccgatgccatcagcgactactggctggaacgggagctggaccggccccgcccgagcatccgccatctgttcaacgatccggaggtgcagccctacctgcgcaattacctgtcgctggttctgcggcaggtgcttctcaacgagttcgacgagcaaatccagaaccggtaccgtttcgacctggagcacatgcggaccagcgagcggtacttcgcccggtcggtcagtctgctggcggctctgcggatgatcaacgccagccgcagcgtggtggacctgatcatcgagcggggcctcaacatgatgccgtcggagaaactggacctgatcgattatgtcaagtacgccgtacgcgcttcacggagcatcttcgattctcgcgtggcggaggcccacctgcatcggattcgctccaatctccagccggggctgatcccactcggctttgagttggagctgagcaatctgggaccggacgcgatcgaatccagacgcagcatctgcaaagcggtcgatccggcctacgacggcttccggtacttctacgacttctacctcgacgtgctctgctggaagctgggaggctacatcgacgaccacaccggttccggccagcgaaggcggacctccggatttctcgaactggcgccgggaaggctcagcattgccggcgatctgtcgcgacccgccagccccgatccctggctgctgaaccagttgatccatgagctggtcagctttttccaggtcgagccacacagtcttcacctgtcatttcaactgctcaagagccgggtcagggagcagaccatcctgcccctggggtttgtcaaatgcctgctggccttgggcggggggcccgaacgaagacccggaggcctgtgggtttcgcgcatgggccatgacgagatcacccagcacaaactcggtgaagaactggtgttcgcccgacgcagccggcgcaactggtatctggggggcgacgagatcggcgacaaggcgccggcccaggcgaccacctatatccagcagtacaagttcattcggttggagaagagggccaactacgagccgctgattctgtgtctcaagggtctgcaactggccttgaaccccggcgactacctcacggccgagcagcttcggtccgaccgggcgttgcagcggcaatacgagcaactgaaaagatgggcggccaagcccacgcagatcagctcgcgggtgatcgcccagtttgtgaacgccgcccagcagggactgatgatcgagcgccatcgtaagccggcacaccgcctgcattacatcgagtgggctctcggcgcgatcaccgttcagttgcggatgttcaaccaacaggtccgggaagccgtttccggatcgaacgagtaaccgaaccctctctgctggctggcgtattgttcgtcaatgggtctccgggtcctgacacatctcgtaaagtccgccgcccgcatggcggagcctgcccatttcgacgagcttgtcccagacttgacgcggatactgattcgggggctggatggccacgataccggaactgcggcctccgctgaaaggtcctccgcctaatgtggactctgcatcgagacgcgtcagcttcagacgctttttgaacgctttcatcgcctgcttgaggtaagccgggggcatgaagtcttcggatgtgccttcgctcatggtgatgctcctgccatggaccgttgggatggcctgcgttacatgagggccatggtagagtcgacatcgcaacgtgtcaatctgcaagcctcgccggcgacgcaaacagccgggcaggggtccgcgacgacgtccgcggcgcggtggccacaggggcgtacggcctggcgggctcccgatgcaccgtggctggcccgctcttgagttccaggcaatccaacacgcggcggaccctccgaaaccggggacgcagcgcccggaacagaagcgaggattgatacttgtcgctgtgcaaaaccagcagatgtgtcaggctgtcgctggcggccaggagtctgcgatacacgataagcgtgtacggcagggcgaccagccgcaacggcaggggggtcgagtgccatcccacgagcagaagacccttccatccgattcgacggagcaggttctccgggggacaggcggcacgcccgctgtctcccggcctgccacgcttcttctctcgccgcatttcgtcaccttctccttcttgtgtacgcaacgaccttgctcgcgacggtctcgccaacagggagtcgcaaaaaccggcgggcagagcatcgccggcagacagaaatgccgggattgcccaggatggttggggtgccgcgccctcgtctgcacaggtctccaggctccgaccggcatcgtcttccttcaacgcggcgccccggcacttcaagcatatcgtgtatcttatagcaggtgacgcgggcacgtgcaattgtggtgactacgtataacgtgtcgttatttccgatggttcgggtcggtcttcagtggaaaccatcaagagcatggtgacacggtttggccgagcacgtgatcatgctacgacgcgttgcgctttatcacgcgctggcgataagcctttgttcgtttgagccggctgatggccacgcgggcaacgcgatcgtggtcgaaggcgaggttctccggcaaacggtcgatgggaaaccacttggcctcggcggcgtcgtcgcctccatgcacgcccgtttgccgtttgccggcgatacccgtgaagaccacagtgatctgccggccgcgagggtcgcgaccgaccgtgccgaaggtccgcaactgctccaggcgtatgcccgtcagtccggtctcttccttcaactcccgagcgacggcgtcctccagttcctcgtccatctcgatgaagccgcccgggatcgcccaccggcctttgtatggttccttcttgcgtttaaccagcagtagccacgccttgccccgcgagaaacaaaacactgccgcatcgaccgttaccatcggccggggccactggtacacatacctgccctttttcgccatgcgtcaaatcctctacagtccgcgtgcatactcatgtcgaacgcgtcgcaggacgtcattctatcggcctgcgtggacatttcaacggccgatcgcggatcgcccgttgcttgcagaccggcgctgacatacaatccacaacttatgtccagtgcatggaagaacattctcctgatcaagcccagttcgctgggggacatcgtgatggcgttgccggcgttgtcggcgctgcgtcgcagctttccgcaggcgcggatcacctggcttatccgtccggcgttcgccccgctgatcgagggccatccgcacctggacgagatcatccacttcgaccgcaagacgctgggcaaggcgtggtactgcccgttcgcgatgaaagccctcgggtctctgatcgcggacctgcgtcggcatcgcttcgacgcggtgctggacctccagggactgctgcggtcggcgtcgctggcttgggcttccggttgcaagcatcgcttcggtccggactggggccgggagtttgcgcactggttctacacgaccaccgtgccgcggcacgccgactgggtccatgtgatcgactactacatgaagatcatcgaggcgatggggggctctgaccttggcgtcgagttcgtcctgcccgagaagccggcggctgcggaagctgttggcacgctgctatcgcagcatgatctggctcgcgaacggtacgcggtgctgatccccggttccgcccagaccagcaaatgctggcccgccgagcggtttggcgtgctggccgaccggctggcctgcgagcacgggctggccatcgtcgccaccggaagcagtactgagagcgcgatggtcgagcggattcagagtcacgcgaagcgcccgatcgtgaatctcgccggccgcacctcgctgcccgagctggtcgaggtgctgcgctccgcccggatcgtcatcagcaacgacacggggccgggccacatcgccgccgccctgggcaagccgctggtgatgatgttcagttggtccaacccgctgcgcgtcggcccttaccgccggcccgagtgcatcgtcggtcgtgacatcgccacgcggggcctggccatcaagagccgtgatccccagcacgcgattcagcacatcaccctcgacgaagtctacacgcgagctgcgcagcagctcacaggccgtgggctgtaggccagagactgtaggcaccgacgattgaccacgctctcagggacactccgaatctgatagaatggtgtcgacgtggggagggtaatttccatgctggacgatagccatgtgggggcggagggacaggaaatgcgcgatcacacagaattgcgggcgtttgagttggcgaatcggtggctctgtgtctccacaaaatgacgaagacgtttccgacggaggaggtgttcggcctgacggcgcagttgcgccgcgcggtcgtctgcgttgctccggacatcgtcgaacgctgcacacgccattggcaatccgactatcttcgtttcctggacatggcctgcagctcagcgcgagaggtggaggatcacttgtcgcttgcttcctgcctcggatatctcagcccacaggactacgagtcgctccgtggtctgcgcacggaactctcaagggtcttgagtgctccgctcctctcgctgcgcaagcaataacggcctcctcgaacctatggcctcccgcctatgcggaggcgacgacggtcgcgcagcgctggcagaggtccggatagtcggcgttggcgccgacgctgggccagtagttccagcagcgctggcacttggcgtgggggctcctggcggcgacaacggtcgtcgtttcggcggatcgttcgagcctcacctcgctgacgatgcacagcgccgcgaacgcgtcgacgccgaatgcctcgatcacgccggcgtcttcgtcggtgcatcgcatggtcaccgacgcctcctggttgctggcgatggtcttgtcctgccggagtccttcgagaacgcgcaggacgttgtcgcgaagggccatgatcttctgccatcggacctgctggctggcgtagtcgatgctcgtatcgaccgtcggcaggttcgccagatgcacgctggtgcaatcctgaggcttgaacggcatggcctcccacgcctcctcggcggtgtgggccaggatcggcgccaagagccgcacgagcgcactgaggatctcgtacatcaccgtttgaccactgcgtcgtgacagcccgtcagcggcgtcgcagtacatccggtccttgaggacgtccatgtagatgctgctcatctccaccgtgcagaagttgtacagcagcgagaagacgcgatggaacacgaagttctcgtacgcttcggtgacgtcggcgatcagcttctgcaactggcacatggcccacttgtcgatctcgaacatgtggtcgtaaggaatcgcgtcgatggctggctcgaagccgtcgaggttgcccagcaggtaccgcagcgtgttgcggatcttgcggtacgcgtcttgtgtgcggccgatcagctcatcgttgcagcgcacatcctcctggtagttgacactggcgacccacaacctcaggatgtcggcgccgtacttggcgatctcgtcctgggcgttgacgtagttgcccagtgatttggactgcttcatgcctttctcatcgacggtgaaaccgtgcgtcagaacgctcttaaagggaggtttgcccgtggcgcccagcgccggcagcagggacagttggaaccagccgcgatgctgatcggacccttcgaggtacaagtccaccggcaccggccagccggccgccaccgcgacgctgtaccagctacagcccgactcgaaccacacgtcaaagatgttctcctccttgcggagctggtcgaggtcgaaccctgcgggcattgggaagtcatctcccagaatctcgcggggtgagtcggtgaaccaactgttggagccatgccggccaatgtgtcgggcgaccgccatcacggactctttcgtcagcagcgttcggccatcgggcatcgtgaagacggggatgggcaggccccagcttcgctggcggctgatgcaccagtcgggccgcgattcgagcatgcctgcaattcgtttctggccccacgcgggaatccagcggaccttttcgaccgcgtccatcgccatcgcgcggaggttgcggccggtgtcgggcaggtccttgtccacgcccacgaaccactgctccgtcgcgcggaagatcaccgggcctttgctgcgccaacagtgggggtagctgtgggtgatttctcgctgggcaaacagccggcctgtttgcgccaagtgctcgttgacctccttgtccacggtcagcacgttcttgccccgcagccagtcaggaaccgtctcgtcgtagcacccgttgtccttgacgggtgaatacaccgccaagttgtaccgttggcccgagagatagtcctcctggccgtgccccggcgccgtgtggaccaggcccgtgccgtcctccgtggtcacgtactcggcgaggatcaccatgtaagcgtccttgtcggtcgggttgtcctcgatgaagggatggcggtagcgaagcccttcgagttcactgcctcggaccgtcttgggaccgacggtgtattgaccttgcaccaggccgcccgccacgacgaccgcctcgatgcgatcggtggccacgagcgaggtgtacttgcgtccatgcttctcgtacgagatggcggcgtattcgagattcggatgtacggcgatcgccaggttggcggccagcgtccagggcgtggtcgtccagatcatcagggcgacctcggaatccttggcctggtcgtttgtgacgactcccagctcgatcagccgggcggtggtctccggcgtggcgctgaagttgacgaagatgctcggcgaagcgatgtctctatattccagctccgcctccgccagcgccgtctcgcacccgacggaccagtgaatcggcttgagctgacgatagacgagccccttgcctaccagcgttgcaaagacttcgaggattcccgcctcgtactggggcttgaaggtcaggtaggggttctcgaagtcgccgaacacgcccaggtcctgaaactgccggctctggagcttgacatacttgctggcgtacttcatgcactcgcggcggatctccgtcttgctcatctgccggaccttctcgcccaggtcggtcattaccttggcctcaatgggcagaccgtggcagtcccagcccggaacgtacggcgcgtcaaagcccgccatcgtcttgtacttgacgacgaagtccttgagaaccttgttgatgacgtggcccatgtggatgtcgccgttggcgtaaggtgggccgtcgtgcaggatgtagagcggggcgcccagccgggcctcacgaatctgcgtgtagatgttctctttcgcccagcgctggcgcatctggggctcgcgctgcacgaggttggctttcatcgcaaagcttgtctgcggcaagttcaacgtatcgcggtagttcttctggttcttgtctgccatcgtcaaggtccttgaaatctcggaaatcgaatcgcgtatcttagggtttgcgccggccgctgtcaacggaaccccaaacgcatagggcctgcgtcgcaaggatggcgaaggcctcccaacgaaagaagccttccggagccggctgctctggaaggcttctgtggttgcgggatcgaggcattctcagggcagcttcctgtggtctccaatcatagcgatcgggccggcgcatatcagtcgcgttgccgtcccagccgctgctgccccgaattctctaccgtttgccttctgcacaatgcgctctatgaggttcgatctttgccagaactctcggcccacgtctaccatgacttcagttctcagcagttgacgctcctgcgccttgccatcgcaggaccgcgaggaccgggttgtgatcggagacaaccggctcgtcgacaatagtcacctgctcgacactccacgagtcggcggaacggatcaggatgtagtcgatcttcgagcggggagcgaggacgtcggtccagccggcgtcgagcagaacgttcattgggcgactgccgggccgggcgttgaagtcgccggccaggatcacgggcgcgccatcttcggtgccaaacaactgggccagccgcatcgtctgctgcgtgcggatctcctcatccagatggcacaaatgcgttccgacgaaccgcagcgggccgatgccctccggctcgatccacgcctcgagggccgctcgcggttcgcggtcgccccagtagggaagggggtgcacagtcgtcttgaggatgggaaaccgcgacagaatggcttcaccgtagcggccgccctggtgcggcatcgcttggccgaaggcgtggtgcatccagcagagcttgccgagaagcgccgcctggttgacgccggaagcccgctcggtaccgtcgtcgacctcctgcagagccacgaggtccggtgacagatcgttgatgaccttcgccagacgcttgtagtcgaactgctcgtccatcgcctcgccgtgatggatgttataagtcaacacgcgaagcgtccgcggcctcggcgcgcggaccgatcgcgcttggcagccgctcagagccggaagtgacacaatggccagaacgaatgcaatgactgctcttctgttttgtttcatatcaccacctgcgatcggagattcgacattccacggcgacacaacattccttctcccgtgacgttcgtttgatcttccgcaacggacggtctgttgtcaaacgcggatcctcgcaaagcggcgtttgccgacctgaatgaccatgccgtcggccggtgtggtcgcggcgttggggtccgcaactttctgcccgtcgatgctgacgccgccctgcatgaccatgcgtttcgcttcaccaccggtctcgaccagcttgcaggtcgtcaggagctgcttgatgctgatcggctcagccggcagccggaactcgggaatctcgtcgggcaactgcccctgcgcgaagaccttgtcgaactctgccgccgcgatctccgccagctcgggaccgtagaactgcgagacgatcgtcttgcccagtgtgaccttggcctctttcggatgggtctggttcggatcgagcagggtcgcgatctgctcggcgggaaggctggtcagcagcgtgtaatagttggccatcatctcgtcgctgatgctcatgatcttgccgaacatgtcgttcggcgagtcggtgacgcccacgtagttgcctttggacttgctcatcttctccttgccgtcgaggccgacgaggatgggcatggtgatgacgatctgcggcggctggttgttcagccgctgaaggtcgcgtccgacgaggttgttgaaggtctggtcggtgccgcccagttcgacgtcgcttcggaccatgaccgagtcgtacccctgcatgagcggatagaggaactcatgaatgccgatggggtcgccggccttgtagcgcagctcaaacgtgtcgcgttcgagcatgcgggcgaccgtcatgctgctggccagcttgatcaggtcggccagattgagcttggcgagccactcgctgttgtagcggacttcgagcttgtcgggcgaggtgttgaggatgtgtccggcctggttgaagtaggtgcgggcgtttcgttcgatctgctccggcgagagcatgggccgtgtggtgttctggcccgtggggtcgcccacccgggcggtgtagtcgccgataatcaggaccgccttgtgccccatgtcctggaactggcgcatcttgcggagcacgaccgtatggcccaggtgaatgtccgggctggtcgggtccagtcccagtttgatccgcatcggccggccggcttgggccgcctccaccagtcgctgggccaggtccgtctcggtgtagacctccacggtgccccgtttcaacgcctgtacggtctgtaccacgttgtccgacataaacctgcctctctatcttcgttgccgttcgaaagaagaagtggcaatcttagtcagacggacagacgaatgcaatcgggaaatccaccccgtcgagcaggggcggcaacgaatcgcgcggctcgcttgccgatccgtcgcggtccgggtatagtcgccgcagcggccgggtatgttcggaggccgatggtcgcgaggattgggatggaagactgtgcagaaatgccgacggtggaggttgtcgaggccgatttggattgcgtcgcgcaccagcgggcggtggtcgaactgattgatgcgtacgccgccgatccgatgggcaatggccggcctcttgcgccgcaggtacgagacaacctcatcgacggtctgcgccggcaccccacaacgctgatcttcctcgccttccatgacggtgaggcggttgggattgcggtctgcttcctcggattctcgaccttccacgccaaacccctgctcaacatccatgacctggcggtggtggcggactgtcgggggcggggaatcggccggcagctcctcgacgcggtcgccgacaaggcgcggcaattgcgctgctgcaaactcaccctggaggtgcaggagaacaaccatcgcgcgcggcgtctgtacgaggcggcgggattcgcccaggcgcaataccatgaaggcgccggcggctcgctgttctacacgaaacctctctgacgccaatgtcgttgcgtcctcaataggcttggccatcgccgtacaaggcatcgattcccgcctcgacggcggcccgtgactccgccttcatcagggtcatcgtcacctgcttgcggcaggggtgcaggcgggcgtagcggacgatgaacttgcggaaataaccgatcgcccgtttctcaggatagccgttcagcacacgatggaagtgttcgagcatgattgcccgctgctcggcgaggtccggcgggggcgggaccgggcgattctcccacacgcagcgcaggtcgcggaagatccacggattgccgattgcgcctcgggcgacgacgaacccatcgagacccgtccgcttcatccgttcgacggccgcgcgcgggtcgaagacatcgccgctgccgatgacggtggccgacgggaaccgggccttgacctgagccagggtgtcccagtcggctttcccacggtagcgttgttcgacggtgcgcccgtgaatgaccagcgcatccaccccttcctcgatggaccgcgtcacgatctcccagaagtcgtcctgcgaggcgctgtcgtgatcgatgccgatgcgaagcttgatcagcagcggacaggcgatggtctcgcggaccgtcttgacgatgtcgatgactgttctggggtgggccagcagggcgccgccccgcccgcgccgaaggaccttgggcaccggacaggcgaaattcagatcgatcacgtcgtacccgaccgccaccaggtcgcgggcggccttggccatgatcgcagggctttcacccatgatctgggcgcccaccggatgctcgtcgatgcccggccgaaagcaggccttccgcaggacgcgcggctcggccatgctcttggccagcatcacatcggccagcgcgaatggacagccgaaacgccgtgcgaacgagcgcatggtgtagtcgctgtacccgctgagcgaagcctggaagaatggaacgtccagcgtcaggctgccaagtcgtagggcgatgggattttgcatactctttccggggcgattctctgtgcgccctatggcctgtccatgtggtcggctttgggactgcgtccgtcccgactgtcgatggacggcttgccggtgagagtcttgaggatctcactggtgaccggcgggcatccgggcacgtactgcccgtcctgcccggaccgggcggcacagttgccgatacaaagggtcccctcaggcagattcgcattccccttgccgatggcgatattcagatgccgccaggacgggaagtagtcgaacaactggtctcgatagcccttcaggaacaacagcacggtggactgacacgcactgcaggagttcctgtcgaagaccgtgacattgggaaactcgatggtcaggttggccggcggcgtggcaaacggtgtaatccagtcctcccaatgatcgggcgtcacggagattgcggccaggtcgatgacgccgtagccccgcgccgccccgatcgccagatggggaacggtctcggcggtggtccccatgagccggcacgccaccgcgtcggccgcaaacgcatcggcgccggcgaccacggcatccatcgccttggcctcgcccgcgctgggccccagaccctccatgcccaccgtaccgtcgatgatagccaggtgcggacgcagcaccgacgccatgtcggcgatcgcgatgtcgatcggtttctcgtcgctgccttcgacgggccccagcatgtgcagttgcaccttgctccgccgccagaggcagcccttcatgttcttgaccgccagcgtcaccaccgtgtgcatgtgcatcttcatcaccgggatcgagacgaccagatcgtagtcgcacacgtcggcgcagagcttcagcttgtggagcgccacaccctgctcaatggctacctcgacgggcgggcgacggtccatgtcgatcaggccgcagccgcgttttcgggcgacgtcggcgattccggatgtgacgaacgcctccatggcgtcgacaccggtaatcgggctttcgccgacggccacatccgcacccgcttcgaccagcgcgtcgatcgcggccgcgacgacgtccggatgcgtcgtgatcccctcgcccggcgttgccacccggccgacgttgggtttgagcagcacgcgcttgcctcgcgcgggcgacaggtccagccccgccagggccgagcgcgtattggcgtacggcccctggccgtgggcgacctggaccgatggatgcgcagttgacttcaagagcggattctgtgctaacatagtcgttgcggcaagggcacgatacggggtttccagttgtccctcaagtcgtgcctggtgatcgtcaacaagctgcaaaatattcattatatcggttttctcacttcgctgtcaaacgctggttcgccttgcatccatagcgatccggatggatatcgcggtcggatacctcagaatgaccgccgcttgaggttgctaccggggcgggcgtatggtagcttcaaacgtgtttccggccgcgaggtggcttatcgagcctgaaaaatggagagattgaccggcacaagccgatgagacaatcaatggaagtcaatcgcatatcctgctcgaagcaggtgattcgaggtgcacgacattgagaagactgagcgtattgtccggcggcgtggtcctggtggccctgggagcagccgcgttcttcggccgcgggttcttccgaggcgcgatgacgatccacgatctgctcaccgagaaccagcagctcaagagcgccatcaccaatctgactgccgaggatcagatcggctatgccaaggtgatctcccaacgcaccgagagtgatgggcgcctgctgacgaccctgcgattcgtcgagaccagccgcgaggacaagacccagacgatccttcagaaggagtacacgatcgagggggacgtcattcatttcgatgccctgatcgtcaagttcacggaccagatggttatggacggcaaggcccgcgccctgtatatctggcgccgtgtctacggcgagaagatggcccccgaggaagggttgcccatcgagacgatgggcagtgagcccaaacgctacgccgacctgctcaagcttcttcccgccgaccagcgcgacctattctggtcccacatctgggacctcgcccacgaccccgaggccctgtcgcaatacggcatcaaggccatctacggcaacgtcatctattcccagctccgcgagggcctgatctacgtcttcaagattggtcccaccggccacctctacgtcgaagatgtccccgccatgtagcaccggctcgtctccgcttgctcggctgcaccgccgttgcgcgttgacgggtgggggcggtccgggtatggtgtgggcggcgttgtgatcggcagaccatgaacgggcggctatgcgaccggaaacggatttcgacattgtcatcatcggaggcggtattgtaggattggcctcggcgtacaagcttgtgcagaggcatccgcaggtccgtctggcggtgctggagaaggaggaccggctggcgacccaccagagcggccgcaattccggcgtgatccattcgggcctctactacaagcccggctccgccaaagcgaagacctgcgccgccggacgcaaggaattgatcgccttcgcccggcaatacaaaattccgcacgacatctgcggcaagatcatcgttgccaccgacccgcgcgagctgcccgccatggagcgaatcttccagaacggcctggccaacggggtcgaaggcctggagaagatcgggcccgggcgaatcaagcagatcgagccatccgtcgccggcatcggaggccttcacgtccccagcgccgggatcatcgacttcgtcgcggtggccgagcagttggccgaactgatctgcgagcaccggccggagaacaaggtcctcaccggctatcgggtcgagtccttcgacaggcacgatttctacctgaacatcaggacctctcgcgggcaggtcagcacgcgctacgtcgtcaactgcgccggtctccaatccgaccggatcgcctggatggaccgtgttgatcccggcgtcaggatcgtcccatttcgcggggactattgtgatttgagcccggaagcggcgcaaaaggtgaggaatctggtctatcccgtacccgatccggccttcccgttcctgggcgtgcacttcacacgcatgctctccggcggcgtggagtgcggccccagcgcggtcttctcctttaagagggaaggctacggcaagacggatttcagccttcaggacacatgggatgccctgtcgtaccggggcacctggcgtctgttccttcgccactggcgctacgggctgggcgagtgtgcccgcacgttctcgaagaagcggctggtcgcgcagctccaacggctggtgccctcgctgaccgtcgaagaccttcggcccgggaacgccggcatccgcgcgcaggccttaggccccagaggcgagttggtggatgatttcaagatcgaagcgacgcagaacgcgattcacgttctgaacgcaccgtcgccggcggcaaccgcctgcctggccatcggcgatcacatctgcggactcgcgacggagcgatttcaattgtgagaagctgatatgatcgacctggcggcgaagcggtacatcgttctggtgcaatgtcatatcgtcaaggaacgctgcccgggctacctttgtgagaaggccttccacgagcggaccggcggctttgcgccgtatccgaaagaccatgcataccggatgctctcgatgacctgcggcggctgctgtggacgcgccctgcatcgaaaactcacgctgctgctccggacgatcggcaagcaggaaggaatcaccagagagcagatcgtggtgcaactgtcctcgtgtatcacgaacgacaacttccacgcaccgccgtgcccccacctggactaccttcgggcgctgatcgcgcgaatccaactcgacgtgctcgatgccagcgtcatcagcgcgaccgccgagaagcgaagacgagaggggcgatatcagtcctgagtcgaacaccatgacaaggaagcacgcgacgcccagtctgttcgcctcccaggaaccgcccgagccggcgtgcacgcacattatccgcgtggccctggcctcggcggcggacacggaattcgactacctcgtgcccgatgcgctttggcccatcgaagtcggacgtcgtgtcgaggtgccgttcggcaggggcaacaaacctgaggtcggtttctgcgtcgagtcggacgttgtgcccgcgagggctttcgacagggtgggccgacaggtccgtctcaagcgggtcgccggcgttctcgacgccgagccgctgcttggccccgacctgatggagctggcgcggtggatcggcgactattacgtctgtccgctcggccaggtgctggcggcgatggtgcccggtgcggtcaagcgggcagccggcgtcaagaagcagcgctgcgtatatcttggcgcacgggccgaggagatcgcggcgaatctccgcagcgccacacagaagcggatcgtcagtttcctgggcgagcgcaaggcgctgacagttgactcggcggtcgagatggacgaattggttgcggcggttgattgccgcgcgcctgcggtcaagcgactggctgagaagggcatcgtcaaggtcacggtgaagaaggtcctgcacgccttgccggtggtgcccgaggcgatggctcttcccgaacgtgaggtcgtgctgaatgccgaccagcagcgcgggctcgaacagatcgtgcgtcagatcgagtccggtcgcttcggcgtcaccctcctgcatggcgtcaccgacagcggcaagaccgaactgtacatccgtgcgatcgaggcggttctccggaagggcaaggcggccatcgtgctgctgccggagatcgcgctaaccgcccagacggtgcagcgattcagcgcgcggttcgcgcggatcgccgtaatgcactccggcctgaccgccggccagcgcaacgtccaatggcagaagattcgagacggccagaccgatgttgtgatcggtgcccgctcggcggtctttgcgccactgcccaacttggggattgtggttgtcgacgaggaacacgagccgagctacaaacaggataccgccccgcgctaccacggccgggacgtggccatcaaacgggcccaactggccggcgcgcactgcatcttgggtagcgccaccccttcgctggagagccttcacaacagtcgcaccaggtccagcttcactctcgtccgtcttcccagacgcgtgatggacctgccgatgcccgagatgaagctggtcgatatgcgggcgcgcgatgccgtcgccgaccggcgggacctgctcagccagcctctggctgcgcacctggccgagacgctggcgcggaaggagcaggcgatcctcttgctgaaccggcgaggctacagcaacttcgtcttctgcccttcctgcaaatacatgctgcaatgccgcaactgcgacgcagcgctgaccttccacaagacatcgcgttcgaccgcgcccatgaaaaccgttaccggccggcatatggacttcggctatgcgatctgccaccattgtctggcccagacgctggtcccgcgggactgtcccgtgtgcggcaaggcgatgactatgatcggcctgggttcgcagcggctcgaagaggagttggcggcgagattcccgcaggctcgggttcggcgggtcgacagcgattccatggccagccaggactactaccggctcctgaaggaattcggccagggccgcatcgatatcctggccggtacccagatcctcgccaagggcctgcactttcccaacgtcacgttggtgggcgttgtcagcgccgatacgtgcctgtatttaccggactttcggtccaacgagcggacgtttcaattgatctcgcaggtggccgggcgggccggacgctcggagaagcatggcaccgtcttcgtccagacgtattttcccgaccagccgacgatccagttcgccctccggcaggatttcgagggcttcgtccgtgaggagatgaagcaccgcgaggtctgcacgctgcctccgctgtggcgtttggcgacgattgtgatgcgtgacgagacgtacgaccggctcgaaaccgccgcccataagatgcgtgtgcggatcgatgagatcatcgcccaccacggccttcaggcgaaggtccgcggcccgatgcccgcggtcatcagtcggattcagcggtttcatcgcctgcagatcgtaatccaggcgccgaccgccgcgatcatgggaaagctgtttaccagcctgcggagcgccccaccgatccgtccggcggtgaaaattgctgttgacatcgacccggtcgacttgttatagcttgcaatccttcgcgacgcgtgctatactgcatgtttcgacgaccggggagtagctcagcttggcttagagcgctgcgttcgggacgcagaggtcgcaggttcaaatcctgtctccccgatttcccctcgtcccccgtaagaccatttgacagcaagggtttatgaagggcaggcgtgacattcgattgcagttgatgcaccatattcgcacctaaattacccgaaagcaccgcgtcggccaccttctcggtgatgcccgcgaggcgatcattgcgagcgcgaccatagatgttcgcggtcaggtggggggtactgtggcgggccagttcttgggcctcccggtgcgtggctcctgcctcgtatgtaaatgtgacgaacgccgtgcgcagggcgtggaaggcaatcttcccctcggcggtcttcttcggtattcccgcccgaatcaggtctttgtccagttccctggctggatgggagggcacatacagcagggcgtcgggagggcacaggtactggcgaaaaaactgagcgtagaggcttggcacgaggccgcttcccgcgaaggtttcgagctctttcacaaggcggtgcggcagtggctgaaaaccggccttgcggttcttggtccaggcggggtccagtttcaggcccatgttgacggtatccaggtgccgccgggtcagagatcggagttccccggcgcgaagcccggtcaccattgcgatgacgtagagaatcttcaggtgcggcgccgctaccttcaagaggcgttgtgtctcgtccaggctcaaagcgcgatactgggatcgtggtgtcgtgtcgatcttgctcaatttggccagtgggttgtcctgtaaatagccgcgaatgacgagccaattgcacaagctgcgaagggcctcgacgagattgccaattgttttgcccgttttgcctcgggcggccagttcgcggatcgttgcttcaacacgtggcagcaggccgtccaagtcgcccaacgtttttagttccaatgtctgggcccatgaggtcaagtgacgggacttgtagtaggcgtgtttcgttgcccatgccctgcctttgtgcccaccctgcgcccgtccccaagcgaggtattcggccacggcctccatgaacgggcgacccctgtgcttcaagtgtgtttgcgacggctcgcgatagccgagccggatctgtcgatggtcgtcctccagcttcctcgcgatgcggagggtttcggaccgctttgttgtgcccgtgaagtattttttcttccccgtctggtcgatgaaaaacccctggtatcgaccgcttgtgcttggcttgtgcctcactccggccatgctactgcctcactttttgccaacatgcctgaagataagccgagacggacaaaccgctcctgcgcgcgtcctccatgagtgttttgtgctcggcgcgcgtcattcgaagggtgacgatctcggaaagtcgctcgctggccttcttcggcggcctgcccattttcttttttctgttggccatgatagcattatactttacgtaatcgaattaagtcaagcgctgatttgagagattcttcgttgcaagtgctcggcttccttcctggcggcctccagccgtctgctgatgtgctcccgcaaggcccgcacagtccaagtcggttcaccgaacagccgaacgctcgggggtagctcgccccgctcgacggcgcgtttgatgctcacgcgatgccggccgaacattgcggccagcgttttttcgctgagtaatgtatctggcgacaggtcgccaagatcgcggatgattcctgtttcgttggtcacgacttggctccttgttttgtccggccgggtggccgctgtcctcgccgttcgcgcagaccggtgatgatggcgtgttcaaagcaacggagcacctccagctccgtcacgtcgccggccccggcccgggcgcgctggatggcgtggagcgaaggaaggcgcgtagcaatctgacggcgcagaatgtcgatgacatcacccgccgcgcggctttgtagccacgccagacgcagctcgaaaaaggcccggtggaggatctccactgccgtccggatgtccgggacaaaatcgagcaactcggccgccgcgcgcatgagggcttcgtcccgcgcggcgaaccgtcgttcgacttctgacgcgtcgtatgttgtggtcccgtcgtcggcctcgtggcgcaggcccaactcgtggagtaagaattccatccggtcgcggtcgagtccgtgccgggccgccagttgggtcgatgtcaacaattctcgcttgtccatgtccatttctccttttgtttagtgttcccaacgttcttcgtcgccggcgccgacaagcgccggttcgtttttctgcttctgggtgtatcgccaagcggccctccgcatcaggcgggccagtttttcttcggttgtgtgtggcgcccgtcgcccgttctcctttgcaatgcggcggatattttcaagcaggatgtcgcacgcggtattggcgtcttccgggctcgcgcacagcgcgaacggcgcccacgtcactggccggccctttgcggagagccgacatgtcgatttgagggactcgtcgaggctcgcgatgttgaagcaaatttcattgttgtagacggacacttcggccacccacaggcgatggagggccagttcgatcagtcgttggatctcagtcatcgcgttttttgctcctcaaaatgacccccagttcgtggagcgtcaaagcgccagtgtctcctggctcttttccattttcgaaatgatatgccagccgcatgttctcgccttcgctagacctcgttttcaggaggtacatggtccggttgtgcgtccgttcgtccgttccgcacggcgtcttgacccgagagactttggcatcgtggctttcgagccagatgacgctgtcgagcgaccgtgcccacgcggccccccccgcaacgttgtcgagatcgggcaggcgaccaccgccctttttggggtgcgtgacaacgatcaacgaagcgcccgacatcctgaccgcttgctccacgcgggacagaaacttctcgtcctcgacccacggatcgccctggcgcatcaaggccgtcgtcgggtcgattatgatgatccggaacccctgggccgctcgttgctcgacccattcggcgccctgtgagatggtgaactggtttgggacggtgtagatcgattccccgatatgattgaggaactcacgatgctccgcgaataggcgacgaacggtgtctggatgttctcgaacccagtcgctccgcgtcagatcggcgatatttgtacgctgcgccagtatccggttgagatggaagctccggctgcgctcaagctccaggacggcgactttgatcccccgttcgatccaaacggcaagtgactgggtaatagcgaagctcttggaggcaccgccggcaccgacaagtccaagtcgcgagccaggcgtcaggccttggaccaggccggtgagccaaggccacggccacgctatgttgacaaacctcccggcgatctgatcctcgatctgggcgcccaactcagatgccgggtccgccaccgcaacgggccgggcaggcgatggctcaccgccaacccagtatggtccccatatttctcggttcactcgctcctgcaactcatggaggtcaccaccggcgccgcaccgccggcacttaaatcggacgatgccatcgcgagccgcgtagacgacgacgcttccggaaatgtcgatgcagaacgggcaccagatctttaccttccccccttcgccctctacgcttgcgccggccgccttcagcgcggtgatcagcgcgggcctgctccgacgttcggcatcgacttgcgtcatgatgcgccccctatcgcctctaccccagccctgaaagcatcgagcggaatgtcgtcggggtcggaccattgctgcccttgagccgtactctgcccgggcacctcggcccgagcctgtgctcgcgccatccaaccccccagaaatcgcatccaatcaattcgcttcctggcttttcgttcgttggttcgacaccatgctgctgccttgagaatctcggcccgagcgtcgattaaagggtaggcttcggaccactggcggacgaggtctttagagatgccgacgaatgcaaatccagcccagtcgtatgctacctttttcccctgattcgccatgaacgtgttcttgtacgtgttcttccttcttataccgacttttttggttggtacggccggtggggttttcgcggtacggctggtggggttttctgtcgccaaaaccccaatcgccggttgggttttctcatgtattgaaaccccaatactggttggggttttcggaggctgtgtcacggtgtactgcttgcggtgctccttgccccgtcccggccccttcgaccactcaaccaggagccatccggtcacgcgaagccgcttcgtgatccggcgcacgctttccaccgtcagccccagatcggcggcgatcatcgcttgtgacggccatcctgaattgttcttgccctggcgccaccaaaggtacatccaaacgcggaactctacggccgacatctccgtggcatgcagggcgagcacccaaaggggtggagtattcttggccttgctcacgggcgagcctcctgttggcgtgccgccaatacggcgggcgccgtccgatcgcagcgcagggcgttttgagggcggggggttgactcgtcgggggggaagtggtagcctcgtggcgtagtcctgctcctggccggcgccccgcaagcccggccttttttgtgcgcatgggggatcatgtcggcgcgacctccttccgttcggcagctcgcttcacaagcgcggcccgcacggcggcgagactgaagaggcgtcgccggccgacgcgtaggcacggcaatgctccccgatccgcctcggcctgcacccatgcaaccgggagccggaacacacgggcaacgccatgcacattcagtagttcatcgtgtttcgtcataccacgagcatagcaggagggatgtgcgctacctgtgcatgtacctgtgtaaaatttgagaagtgaagatttttttcggggctcgcgtctacctcttcgcaggcaactcccgtagacgatgcgttcctttgcctctgcccttgacaatcatggcgccccaggcccgatggtccctgaaaagatggtcgagtcgctttgtgtcgcactccgccgcttcaagcagggtggcgtcaccgacgtcgggacacttcctctcccatgactcccacaacaccttcacgcaagcagcctgactgggcgtgaacgtgtaggtctgtccataccaatataccgagcgaaagtcgggtgagtgcgtcgccgaacaagtggttttcggcgccgcctcgccggcccgctccagccatctctccaactcggcaaacacacgatccgtgctcagatggtcccaagccgctggacacagcgtgcgtaccccgctcctgtactcacctgccagccaagtgactacctcatccatctccaggttggccccccattcttttcggcagccgtgcaggaaatggaccagcatccccggtgacttcgcgtgcgtggcgagtttcgcataagctccctcgaccgccggcccgtcgtttctcgcccgcgccgcccgcaagtccttcaacagatccacgagtctgcgatggtagtccacgttaccccctccaggaaaaaaacgcccgggctgatgtcgccgatagtcgcgaggccagcctttcggcctggccgacccgggcagcgataattgcggcaactggtgtgactatccgttccatcgccggccagtatggggtaacaccggcggttcgtcaagtggtgtgagcggtgtaaccaaggcaggagcccgcgcgaaacgctttagtaaattacccgtctatgacggcactgggcagtgcgttggcctgggcgatcatctccaaaaacatggccttcgtcgcctgcgcctgagcgatggccttgtcgcaggcctcgatgctgtcgaggacgggcgggccgggggtggcggacacggccaggtcgttcctctcgcagaccccatacttcgcggaggccacgagcttgacaatgtgatgttccagttttccttcgagtccgccgcgcaaaacgcggacttcgaggatgtcgttcacgcgatccacggcctcggcgaacaccgggcttctcgccgacagttgcgcaatatacgcgctggggatgttgtgttcgcagcaaaactccttgaggaagaggacgttggggtcctgggcccattccagtaaatcccgagccagttgctccaggacttcgggcgtccatttccagggtccgagaggcgccatcagaagccctccggccagccgcccgtcaggatgccgttcgggtacttcttgcggatctcgacccgccattcgttgtaggcctcaagcaccttctccatatcgagcccccgcttgcgtccccacttgaccaaggccttgtacaactcctggccgtcgtgcagttggcccgccagtcgcaactgacacagaagaaaaaactcctccatcgggagcttgttggcgccccacgtttccttggccttggacgatttcttggctccggacgtttttttggccttggccttggacgttttcttggtcataaccgatctcctccctctcaattcgcgcctccatgcagcagcgacatcacgtggtccacggggcgcatggcggcgttcatgtcggtcgcgtgcggccggaccagctcctccatctccatccggtacttccatcgttcgatcagcgccttcacgcgcgccgccggcagccgttccaacaaaccgtcatggtcaaacatcatcgcctaacatccctcagggctcgctgtcgaaaactccgggcctccacgtgccggcccgccgcttgcgcgcgacgtccgcgacaacctggtccagtgtgccggacctgaactcatccgagtcatcgagatccgtcacactcagtccgcgtgggccgctgtcggtggggacggccttctccttggcccggtgtctcgccgccacctccgcgtaggccttccgcatcagccgaagaccctcgaccggcgtgtgcgggctgtccgtctcgcagttcgcgaccatgtcatcggccaaggcttccgcctcccggcgaaactgggccccgaactcctcgtcacaggcgtccaaaatctcggccaccacgccttcgttcctgcggttcatgttgttctcctattcacgggctctccctattgtaccaccaaacaccaccctaacaacccccacacctgcaccctctcttcctctgccccacccaggtccgccgggggtcttttttttgccaattttcgcgtccacatccgccccatcatgggcgagggcgcggcgcttgtgcacgcaggcgggggggtcgcgatgggcgaagtgtgtcggagggaaaagtttttcgatttgggacttatcgggggccggattcgtgacgataaggaagacggaggcgggctgagggaatgtacttttgcggcgttcagtgcgaatggtttcggctttggtgcgatattcccggagctgaagacacgtgcgggcgttgccattttcacggccagactcatggccgccgacaggccggaagactggccgcagattggcagacaccccacggggacggagtgcggtcggagtgccgatcccgtggggaccattgaaatgagggcgagatgacagcgaattacaatctgttggacgaacactggattccggttctctatcgcgatgggaggtacgaccgcgtcggaattcgtaatgccctggaagaggccggtcaaatcaggcaaatcgcggccagcaacccgatggacaacgtggccctgctgcggttcctcctggcggtgctgatatggtgcaaaggcgaactgacagagaatgaccgcacactgctcgaaggtagagcggatgggattccgccagagtggctgaacaaactggccgagcataagaagaagttcaatctacttggcgatggcgagcggttctatcaggacaagaccattctcgccgagctattgaaagccaagcaaaaggaatgggacgaacagagaaagaaggcaggatcccagaaagctccgaaaaagccttatccgacatcgctggacgacaacgattttcgtcccatcggcgatttgctcgtcgagtttccaggagccgattcagtaaatcacacacgccatgtgctgcacggttcctatggattctgcccggcctgctgtgcaacgggtatcctccggttctcggtctgggcctcggccaatcgatattatccggcatccgtgaatccgggatcagcggtctatgcaatcgtcgctggcgacaatctggcgcagacgcttgccgcaagtcttccggacaacgcacaccaaacgtcggaaccgccctggttgtcggattcgccgccttccttgcccctcgaaacggcgacagttcttgcatggaggcctcgcaggttatggcttggtgacgctgctgagaagggggtgtgcgcgaactgtggcgatcatcgcggcctaatcaagacgtgacctgccctacggacggtgggcgcgggaaccgctaacggctaggctgcctcgtccataggggtcaacggtccggcttcataccgacgctcgtattcggccggactgagatagcccagggcactgtgacgtcgggtcggattatagaacatctcgatgtatttgaacacctccctgcgggcttgttcttccgtggcgtaatcgctgtcgatccactcggtcttgagggacccgaagaagctctccatcatcgcattgtcccacgggtcgcccttgcgtgacatgctcatcgtcagaccctcgcgtgtcaacaaatcgcggaacgcctgcgaggcgtactgaacgccgcggtccgagtgatggaccaggtcgtcttgcggacaacgccgacgcaacgccatctccaacgccgcacagaccagggacgcatcgatggtccggctcaggctccagcccacgatccgccgcgagaagcaatccaggaccaccgccaggtacagccagccctcgaccagacgaatatacgtgatatccgccagccacttctgattcggacgcgtggcggcgaagtcgcgttgcagccgattcgtcgcgatcggctcgtcgtgattcgagtcggtcgtcttgacgaaacgccgtttatgccggccacaaaggcccagatcgcccatcacgtgacgaacggtctcccggcagcaggcgacctggtggtcttcgatcaggtcgcggtgcacccgccggtaaccataggtcccgtgcgaatcgccgtgcgagcgttgggccgcccgggcaatctcctgccgccgctgcgccctcgccgagggcggacgccgacaccaggcataatagccgctccgcgagacctgcaagacccggcacaggaggttcagcggatagcagtcccgttgcgtgtggatccaggcgtacctcacagggactccttggcgaagtacgccgccgctttttttaagatttcgttctccagacgcagttgggccaattcccgccgggccgctttgagttcttcggccaacgggaccatctgccctttgggcggcaggtggccgttagcgcggaaggccttgacccagcaccgcagggcccagtcgctgacgcccagttgctgcgaggcctggtggtaggtggtcccgccctcgacgatgagcttggcggcctggagccggaactcctcactgtagcgtttcggtcgtgtactcttgtctgccatagatagttcctttcgtgtctatggcagcccagtctatcaagctcgccccgcgcccaccatccgtagggcaggtcaacgctcgcgtttgctgcgggctgggcaacacctctaacggaaagtcaggcgttcgccaaacgcgtggagcaacatctcaagaacctggggcataatgcaaaggattccaagacaaagaaggaggtgaaagccgcgtggatcatcctcaactgcagactggccgagttgcagaaggcatgcagtgacaaactgcgaggaacacttgacgcaggcttaccaagagaacaactcgcggaatcgatagcgaacgcccttgatgatgtcttgaagacaaacgagaagatgttccaggacctcgttaagaagccgaacaaaaaggaagaagcggcaatcggacaagaagacctccggcagaagaagttctggggatcggatccccagcttctggtgtcgaagaatgaggcgcttgcgcttccccgcttggaagccgatgccgaagcgcacgccaggttctggaggtcggcgtttcgtgccgccgcaggaaagcagggacgcaagcgcattgcgataggccccgtggtcaaccagtttgtgtatcaagacgcaacgacgctttccattcccgatacgtctgccgagtcacaggtgcgtctttcaggcgatgttggcgacgaattgctagacctgttgaagcagctcacaccgaatcataaacgcgagcatcctgaaatccgcgctgccttggcgttgctcgcaccagaaacagaagaccgaatccgcgccatcttggacaaaagcaatgtcgcgggcgatgacagggacttcctccgctcaacgttcaagccggtcgtacagaagatcattgcgtccactgctcgcggttcttcgtttcagcgccgcgtggcgatgaccgaggcgtacgccgaacttgagaagctcatcaacaagaagacaagagcaaggaagtcaggcgcgtgtcgcaagaagggagctacgctatgaccccgaccattgaattcatcaacagactggagaatctcaaagaaggcgatcgttctcgcctgcgttggctggcgggccagccgctggacaagacgctttcgggatttgatctgttcaccggcctgtggtggccgctgcgtgcgacaaatgcgcgaactccgcggcgtgaaatctcatggctcatcgccaagctgtattgtgcatcctcggttccgtatgttcggcctgaatcggatgttggggtatcactcccggcggtgcttggcagatgcgaaccgtgcgatccgccggattaccgcgcccgcaatacctttcgccggcgattcgacgccgtgatttgctcaagcctttctgacatcgaaccacgactacagtggggcttgcgcgaggttgccaaggcagttgcgggtcgtgtggtccacgcggagactgtgaccggcatcgactgggcgctgctgctcgacgacctgtcgctctgggacagggagttcaacatggacgacacatggcagaagagccggttgaatgctcaccaacggctcgctcgttgccgtgaaactcaccgcacgccgcaggacctgtgggcgtgcgagtacctgaacgcaactgttcaaccacaaggaggcgactatgctgattgaaatccacatgattcagaaccacagtccgtcgaacctcaaccgggacgatctgggtgcccccaagacgtgcatcttcggcggcgtcacccgcgcgcgcatttccagccaatgcctcaaacgaagcatccgacgcagcccggaattcgcagcggcactggagaaagacggcggggttcgcacgcgccgactgattgaggagattgcgaaagcggccggccgtgatggcaacgagcccaaagaagaacacctcaaagccgtccgggaagtcttcaaagagggcggtgtcggcctgaaggatgagaacacttttgacatcctcttcttcctgcctcgatcagccatcaaagaaatgggggtcgccgtgagcgccggtaacggtgatttaggtaagaagttcgccgaagtcatcggcaagttcgtcaagacgccggacatcgccttgtgcggacgcatgacggagtttgatgcgaagggcccgttcgaaggtctgaagggcaaatttaccgtcgaagctgcactgtccgcagcacacgccatctccactcacgcggtcgtaaacgaggtggattacttcacggcagcagacgacattcccggccaggacgcgggggcgggacacgtcagcgaggcgatgttcaattcggcctgcttctacaagcatttctgcatcgactgggagcagctgctcaagaatcttggcggcgatgtggagcttgccacgacgaccgtcaggtgcttcctcgaaggcgccgcaaaggcgaacccctctggaaagcaacacgcatacggcgcgttcaactaccctgacggcatcttggttgaggtcaaggccgagaccgccacccctgtaagttatgcaaatgcctttgccgacccggttccggagaagtctgtgcgaggtctgatcggcgagagcatcgcgcgccttggccagtatgcacatgatctcatcgacggctatgccctctcggctgaacgcttctggttttccccgagctcacgccatcgcctgacatggatcgacaaaagcaagagggagcctgagcaagagcagtccgttgtggacgagaagaaggaattcggaaagttcccggacttcgtgaccgctatcatggaggaggtcggcaaaagaagcacggcgccggcgggagggagactatgacagactctcggacgatcttcctgcgtttcgaaggcccgctccaggcgtggggtgatacatccaagtttgtgattcgtcgaagcatggactcgccgacgaaatcgggtgtgctggggctgatttgctgcgccatgggtttatcgcgaccgggggcgcgcgagaagcttccagccttgaacacgcttacgatgggtgtacggatcgaccggcccggcgctcgctggtgggactatcacaccgttggggcgggtattggcttgacgacagcggcaggtgggctcaagaccggtgcgcagggtacggtcatcaaacgactggaatatctggctgatgccagttttctggtcgctttgcagggcgatgcgatattgatcgccacggtcgcagaagcgttgcgatccccgaagtggccgttgtacctcggtcgcaagtcgtgtccaccgtccatgccggtattcgcccagccgcgcaaggatgagacatggaccaacccaatggcggtcgatggtgatatcgaggctgcgctccagataatgccgtggcatccgcgatatgccgacgatgccccgcgcgatcagcatgggaaacgctacgagaacattgagttgccctgcctgatcgagtggcgcagaagaaatgacaaggatacagctccgcctgacgccgaggtctggtacgacacacccttttcgttcgacccgccggtgcatcatccgcgattggtaagacgaggtcaggtcacggtcacggtcggcgatgcgctccagcagcatacgccgccaccacctcgtccccgcgcggactacaataacgaccagtacaagaagcatcgtgctgagcgtctacaatccgatcagggcctctgcgtcttctgcaagtcgccggccacgactgtccagcacgtgacctatcgccgcgccgggggcaatgaggcacaggaagacctgcggtctctctgccggctctgccacgatgccgtgaccatgatcgagtacggcatgggcatgggcctggaccggattgacccgtgcgacgtgcggtggcgcgatgacattctccggacccgcgccgacattatccgtttccgcagcgaggaaacccggcggcgagcactgcgcagtgctcccgagaagattcgccgcgaggctttggaagaagaggatatctgaatcatgtaccactcccacctgctcatcaatgttggtgacaaccctgaccgcccggattggagcatcacccggcgctggctgcgaaatctgtatcgagttcaccagcgcttgtgtatggcctttccgtcgaaggtcccggtgtcacataaggaacgccttgcagcgtactgcgcaccctacagcggcacaggactggaccatctgcgtaacttgcccggggagccggatacagcggacgtgcaccattcccgtagcgatcaggccggattcctcttccgcatcgattaccctgtcgatcacagccggggcgtccgacgacccctcatcatcgtccagtcggcggggaacgagccgccggattggcactatgccttcgggttgaatgaagatgccgtggatgatggcggacgcccgattggcaatgccggattcttgttggccgcgccaccacagaccagaaggatcaccatgagccttgagaatgacgatgtgtttgtaattggcagcccaaaggagaatcatcgaatcgctcccggcgatctggtgcgtttccgcctgcgcgccaatccaacgcggaaagtgcaggacggatcgccgaacggcagccgcaaacgcatttgcccgacgctggtcgatcacgccgactggttgaaaggcaagttgggagatgcggcggattccccggtctgtttggagaacttcgtcaccggttgggcttacggatggcgttcaaagcacgaaccgcagcccagccagcgcatgcagtggtggtccgtactgtttgaggggagcttccgggtaggtaatctgaaggtgctgaagcagttgctcgaatgcggaatcggtccagccaaggcgttcggtttcgggctcttgtccatcgcgccggtcaggtagagtttcccggtcgaatagccgatgggtgtaatgcggatggcgtatctgcccatcgaatcgcgatctttgctgtccagtacgaagggattctggaaatgacggatacgcagaagttttttcagacgctctgctctggcattggcccggccaagggactggggatgggtctgctaagcattgcccgcgcttaggagaacctatggctgatctgcacgaactgccgaagttcgaggaccgctggacgcacctctacctggagcgcggcggcctggacaaggacaaagaaggcctggtctttcgtcagggcgaaggacgaacgctcattccgatagaccagttgtccctggtcatgctggggccgggcacgtcgatcacccagcaagcagccaaggcgctggcggccaacaactgcctgatgtgcttcgtcggtgaggagggcgtcaagatgtacgccttcggcacgggaggaacgcacagcgcccaccgactgctccggcaggccgaattgtatgcctctccgcagcagcgggaactcgtcgcacgccggatgtacctgaagcgattcccgtctccagtctcggcggatgtgaccatccagcagctcagggggatggaaggggcgcgggtccgcaagacctacgagcaaatggcggcaacctgcggcgtgaagtgggaagggcgcgactacgatcagagcagttggtacaccgccgacccgctgaatcgggcgctgtcgtctgccaattcttgcctctacagcttgtgccacgccgcgattctgtccgccggttacagccccgccatcggcttcatccacacaggcaaggtgctgagcttcgtctacgatgtggccgacctgtacaagacggagatcacgattccgctggcgttccagaccgtatccggctccaaggacgacgttgaaagacgaacccgactggcctgtcgagacatgttcaaacaggccaagctgatacggcgtatcttgcctgatattgcggaggtgctcgatgctcgtgatgatgttggagaacgtgccgatgagcttgaggggcgagctatctcgctggctgatcgagcccaaggctggggttttccttggaagtccgacggccagaatacgggataagctgtggcagaacgccctgaagaagcgcaagggcggctacgtccttcagatatggtctgattccagcccgcagggctacagcttccggtccgaaggcgaatcgtctcgccaactgcaagacttcgagggcattgccttggtggcttacaaagacaagcgtaggccgagccaggtatcaacatcttgaggtctgcccagtcccggcatacaatgccgtggtattgtccccacgcacgtgggggtgaaccgatatggcaatacttcttttaatgcagacacagattgtccccacgcacgtgggggtgaaccggcactgcaagcgatgtacacacggcgactgctattgtccccacgcacgtgggggtgaaccgtccacgactgttattacccgcccgatccacagattgtccccacgcacgtgggggtgaaccgacggtttctctgcctgtgggtgctccgtatctattgtccccacgcacgtgggggtgaaccgcgtgctgagtgtgctggatgggagttttcggtcattgtccccacgcacgtgggggtgaaccggtgtgggccgggcggccataaggggagatttgattgtccccacgcacgtgggggtgaaccgctcagccagcttctccaagcaatcaccacaaaattctccccacgcacgtgggggtgaaccggtgatcccggccgacgagaacgtcgcacacggattgtccccacgcacgtgggggtgaaccgaccgccgccgccgtgctcccggcggcgagacattgtccccacgcacgtgggggtgaaccgccagatgaacatggactgggagggctccgcggattgtccccacgcacgtgggggtgaaccggggagttgttcgtatcctcgcacagccgcaattcgacttcccactcggcctgcgtaaagcccgtcactccattctgcatgtcctcgaacggcacgtcgacacacaggttgcctctggatgctgtgagggatgaggattccctcatccggggcaatttggccatctgatctccgtggggcagcatttgtcaagacaccccgcgtcgtaggggacccgtccaccatacgccgctgggcgtcagcccgcctccgggccaaacggacggaatcaccacaggtcccggaccaagtatcggggcttctgcgtcagctcgatctcggccgccaccttcgccttgaagtgctcatcgtactcatcggtccgcagatcgagcacccaggtgctcacaaacatcacgctggcgagcaggtcctggcagccttgttcgacttcgagttccaggtggtcgatgtgctctccctgcggcggggacgccacccctttcagcccgcccgccagcaggaatagatcccgcccttcccccacgagcggctggcggcgccctttggccgccatcaatgcctccgctctgtccttgtcgaaactgacctcacgcatgaagccaccatcctttcgccggcgtcctggcccgaccgccgcctgtgaatcctaccttgccttgcccttcgcagaaccaacccgccccgtgcgaaacataccgtaccgcatgggacccgctccacagaggcccacagagctcgccacgggccttctgggcgttccaattcacagagacggcccttgggtcgggtccgggccagatcgtggctaattccgtcgcgaatcgcacacgtattcgagttggggcgacgctgtgagtcgtctcgacggccgtgggcgtcttgcgccccgtcagtctgtaggcgaacaaggggcagcccgtgtcggtgcagtcccgaaccgcgttcgccacgtaagccatgcactccagacacaacgaccggatggcagcactttggctgcgtccggtcatggccagccggtagagcctctgaaaacgtcttggcacatctctgtccgtcatgctgttggatctccttcggccgttccgtcaaaaggggccgatgccccatgtccgtcgtctttgctgatgtcactggctctcgtcggcggcatcgccggcctgattccacatctcgggcggccggacgtaccactgggggcgtttccctccctggcgccggacccggctaatcatgcctgcttcgctcagctttcgaagatggcgtttgatggcctttgtgcgtagcatcccttgctccggtggtgcgcagagccgagccagcctcatgatcggcgcttcacacggttgtcttccgccgtccgtccattcacagagccagccaaacacccgcagtgccccgattccgacgcatcggctggcggcctcgcgccacgccggcggaatcagaagctccgcgcgtgggaaggcccccggtctttggtcgggttggcttctgctcgcggcagcgtcctcgtggggcttggacgggggctcgggtacaggcctgtccagcgcagggtttcgcctgattctcgtagggaagctcaaacgccagtcttggccgctcggcttgtacacatcttcccggcgcccgtagtagcccttccggtaggtcgtcacacgagcatcgaactccacgcagtccccctggtgcagcacgcccagggcccggaaccccttcgtctccgtgaaccagagatgatcggtcacacggacgcccccatccacagggcacacctcacgaaacaaaagcgtcttgaggggcgctcctcgataggcactcttctggccataccgctcgaagatggcacggaacctcattcgttgaccgtccagattcttccattcgtctcttggcatgttggctcctctctgaggcccgatctcgggccgttcgtcaaccacagcgattcacaaaccgtccgcgcattaccagatccgcaccgcaagagcgagagatagtactgtggggccgggggtgccgggggggctccccccggtggggtccgggccgcaatcgtgaagcccgttgccgggccgggaccgaaacacgacaaaacgtgttgtcttttcccgttgcctcctcgcgcgcccgggcgcgagacttcttggctccgagagccagggaacggcacatccccgggataccttcttactcgcccgtcagtgcctccgccgccatccatgccccgagcatcatcctgctttcctcgtccagctccgcagcgccctgcttggccgcctccatcagggcctcgtggtacttgtcgagcacagcattgagcaagtccgggtcgccgtggtcgccgtccgacagggcccaggacaggctcacggccagcatcgtctccagcggccgctgctccagccacgtcgcgatcaggtctttcggctgcctctgcggggtcatcgtgtctcgttcactttccatcgctcagcctccgtcaaaaggggttccgcgccgccggctgctcgcacgagaggcccggccggcacagggttacgttctatgcaggcgcctcaggggtcggcctgtggctcctgaccaggtgcaggatcttccgcttcacatcctccggcaggtccggccaggccgccacgatctgagccaagtcggggtcacccgacgcaatctcgcgcaccaaatgcgcacctattctgtgttcgggagtatcatttcgctgttcgggaagtgcaagagtctgtccctcgaaatccccttcaaatggctttcggtcgcattctgtgcaggaattggagcggtcctgtggtgattctgttaccccacgaatcgggttcaaatcctgtctccccgatttcccctcttgttctgccgcttgccgcattcgatctcgtcgcaggggccagcggcagcttgccgatgggtcccacgtccaagtactcagaccagagccgtttatggaacttgcctcggccctggggcgacggtatagttagaggtcctcgcggctgctccgtgggagctatgtatgtaagtgggctcgccgcgcgggccgtgagagtgcggcgccgcctgggcgcgttggaacatggatgggaagaagggttctgggcaaggaaagctgtggtagattcgggtgcggcaagtctggactacgagcaatttgaagaacgcggattgcgtcttgtcctaaaggggacgttgaacgccgccgacgcacagcggttctggccccaggttatgcagaaggtggcgcagtgtgacccttccgccatcgaagtcgatgccggaggtgtggaaagcttggatacggcgggcatggcccttctgctcgaattgaaggctggacaggagcagcggcagcgaggttttcggattcagggcctgcgggacgatctgaccgaactgatgaggcggttcgatccgggcccgcccgcgccgcctaagccagcgccgccgtggctggtccgcgcgatccatcgtgtcggtgagatctcgcatggatcccttgtgggctttcacacgcaggtcgctttcctgggggagattttcgtccgcctgctgagtgttctggttcgcccgcgtcgtctgcgctgggccgatacattcctgatcgccgagaaggcgggagccaatgcggtcggaatcgtcgcattgatgggttttctgatcgggctgatcctggcctttcagtcggccatcggtatgcgcaagttcggcgccgagatctacgtggccgacctcgttgtgctggtgctgtttcgcgagctgggacctttaatcactgcgttcatcctgaccagccgcagcggatcagcctttgcggccgaattgggcacgatgaaggtcaacgaggaggtcgatgcgctggtgacgatgggcgtggaccccgttcagttcctggccttgccccggctggttgccgcgatctgcgtgatgccgctgctgacactgttcaacgagctgttcggtctgatcggctgcgggctggtcatgcgatcgttcggtttccctgtggcggcttacatcgaccagattcaggaggccgccagcctgggcgacctgttcggcgggctggtcaagacctttgtattcggcgctctgatcgccggcattgggtgtctgcgcggtttgcagacgggcaacagccccagcgccgtcggcgattcggcgacccgcgccgtcgtcagcggcatcgtcgccatcgtggttgctgacggcgtgttcgccgtgctgtactactacttgggggtatgacgatggggtccgacgcaccgccgatcattcaggtcagcgacgtgaccgtgggctacgatcatcacatcgtcctgaaggacgtgaccttcgaggtgggcgccggcgaggtcttctgtatcctgggcggttccggctgcggcaagagcacgctgctcaagcacatgatcggactgcatcggccgctgacggggcgcatcctcatcgacgggaccgatatcgtcaccgccgaaggcgaggagcggcgtgcgctgctgggccggatcggtgtggcgtaccagaacggcgcgctgttcggctccatgagcctgatcgagaacatctgcctggtcctggaagagttcacgagcctgccgcgacaggccatgcagacgatcgcccggatgaagatgaaggtggtcgggcttcaggacgccggcgatcgactgccctccgaactcagcggcggcatgcgcaagagggcggccattgcgcgggcgctggccctggacccgaagattctgtttctggacgaaccttcggccggactggacccgatcactgcggcgcagctcgacgacctgattgtcgaactgtcgcagaccctgaagatcacgttcgttatcgtgacgcatgagctggcgagcatcttcgcggtcgccgaccatgtaatcatgctcgacaaggaacggcagacgatcgttgccaggggctcgcccgaagagcttcgtgaccgcagcgacgatccgtgggtgcggcagttcttccatcgagagtcgtcggctgcaggaatcaggaggtaggcatgtttggaaccggtcaacagagagattgggacggatcggcctgatgggaaggaaaccaagctacttcaagatcggcgtctttgtgattctcgcaacggccttgctgctgacggccgtgatcctgttcggttccggcgtgtttgcgaaggacaagctgagattcgagacctatttcgacgagtccatcacagggctgacggtcgggtcaccggtagagtttcgtggtgtgcgcatcggtcaggtcgagaccatcacattcgccggcagtgtgtatgcgatcccgccggacagcggacgattgtccgtcttccagcctatcgtccgcgtcgtctacgcggtgccgcgagagacgatgcccgaactcggcgtcgaaaaggccggtgccatgcttcaaaagatgattgctcgcggcctgcgcgttcgcgtcaattcgaatatcctgacgggccagggctacctggaggccgactatctcgatccgaatcgcttcccgatcctcgaggtgccgtggacgccggtgtacacctacatgccgtcggcgcccagtgagatcacgacgttgaaagactcgctcgaaaagattttcacccggctggaggagattgatttcgaagggctggtggattctttcgagcggaccctggtggccgccgagagggcggtgggggatgcgaatctggcccggatcagcgaggaagccacgagcctgctggcggaaacacgggagaaggtccaggccctcgacgtagcgggcatcaacgacgcgacgcagcgtttgctggcctcgctggagcggaccgtcgcggatgccaacgtgccggaactgagcgccgaactgacgcggtttgttcaggaaatccgcatcacgaacgacggccttcggcgtctgctggcgtcgccgacggggaccgcgggcgggtccaaccttccggaggttgtcgcgcggctgaaccgggtgctgtcgagcatcgaccggctggtgacgaccgagaaaccagagattgaaatcatcatcggcaatttccgggagatttccgacaatctgcgcgacctgaccgacagtctcagggagcgtccttcggagctgatcttcagcaaacccccacgtgaatcggaggcatacaaatgatatgtaaggggacccggccggccctgtttctggccctgaccatgttcgcgcttgtcctgacgggttgcgcgaggccgcagtcggccaacagccgcttctacttgcttcagacgtctcgctcgttgtccccggccgttcgcgaaggcaaggctgttctggcggttccacggttcaccatcgatgcggcgtacgccggcagggggctggtctaccggctcgacgaacatcgatacgaatccgacgcttacaacgagtttcttgtttcaccgaccgtgatgatcacggagaggacacgcgactggttgacccagtcgggtctgttcgcgcaggttctcggctcgggcagcggcgccgagcccacgcatcgaatcgaagccaatattgccgctctctacggtgactttcgcgacaggcgcgcgccgaaggcggtcatggagattcgtttcttcctgctgcggaccgaaagcggcgtagacccggagatcatcctggccaagtcctacgccgcgacggccgacgtggcgaccgccgggccggaagggctggtcgccggtctcgaccgctgccttcagacgatcctgacccagttggagaacgatttggccggtgccgtctgacgctgaaccgttcgaatcagagtcgcacgatctgacaggcgatgtcacttcgcaccaccggcacggcgacactcaatcggtcctggtcgtgtcgaacgcggtgcgtcttgatgcaagtgccctgacttgtatcccaccactgaacggcgtactcgcccggcgaaaagtctgggatttcgagggtcgcaccttcgatctcttgaggtgtctgccccgcgacgaccttccaccacgtggcgtcccggctggacagccacagataggtgcgatccgttccctgatagcccagcacgcgtagacgcgcgtcggacacagttgcgcctgtcgctctcaatccctcgaaggagatgtcccgcaggtatgccgccagcggccgatagtgacggtaggcgtcctgctggtccaattgctcccaccaccagaacatggccgtgcccgacggtccggcgaaggtcgacgcccagagagcattatggaagtgcacgccatcggtgtcttgtctcatgtgctcgctcaggccccacttgtcggtggccaggccgaactcgccgatcagcgccggtttgttcggcgcgtgctctcgcagaaaggccgccttttcgaggatggcctggacttcgtctttgaagtctgcttcgccagggcgcaagtagtggtgcagttgggcgacgtcgagggctgcgaggccacagtcgcgcgccgacggatgccatgtgctggtggtccgcaggtggcggtagatgtcgatttcgtcgaggtagccgcccacctcctcatagaagtggtccgttggcttgcccgggtcgatctcgttgaagtactcccacgcgccgacgctggtcgagtagccccaccgggcgacggcatagcgcatgaactttctggcatccgcgatggctcggtcgtaaggcacattgttcggattgccaagctcattcatgtaaagatcccgcgtcagcaggcaaagcatcagatagatgccgtgtttctcggcggcctggacgatctgatcgaccatgaagcagtcgagcggattgtagtaaccccgcacgggacgattgacatccgcttcccatagcagctccgcgctgtcgtcgctttccttcagcgacagaccggtcagccacgcagtgccttcgcccgaaagtgcaactgtggtgtggcccagccagtactcatcggggccggtggtgaattcttctgcgaagtcctgccaggtggcggtgtgtgccggcacccgccaatcgtgtctgccgacctggattcgcaaaccgtccgctccgtcggccttgaaccttccgcggagtgtgtaccgcgtgtccggccgcagcgccacccggtgcgagggcgaaacctcgatcgaagcgccgtcctggccctgcagttgtacgcacttgccctcggcttcaggcaggggaaccacgggcgattgccggttccatgaacgggtccacgcgctcttgggagcctcgacggcgagggcccagtcatggcaacacgtccaaatgcgcgcgaagttcgcgccgtttcgcgccatctccgcgaagatcgcctcggccttcgggacgttgacatactggctctcgccgatgaaggcgaggttctggccgatggcgaagaagggctggccttcggcgaattcgagaaacctcgggtcctcgcggccgacgcgcaaaaatcccttatttgtggaagggacgcactcgatccggatggtctgcgacagcgattggccctcacggtcgttcaggcgagcccggatcgtgtatgtccccgtctccgtgggtgcgaaccgtgctttccacgtcccttgaccgatcgggtagcaccaggccacggttttgccatcgctggggaaatctcgccgttggtaatcctggccgaaaaaggccggcagaacgagcgcccgcccgctcgggcaatcgatcagcagatcgatcgcaacctcacatgggtcgaagggattgtcgtacgtccgctccggcgtcagtgtcagttcgagcttgtcatacttgccgacatgggccggacaaggcccgatggcgaccagccgcggtgcggcaaggaggctgccggacgccgccagacagcctgcgaacacgtgggtaaaaaccatcctgcatcgcatgcgatgttctccttatgacctgaccattcacgaggcacagcctaccatgccgcgtccgtgcgaggaagcgcccttgcatttgcccggcgaaggccgcatactcagcgtgcggggttcggaggggatggcacgcaggcggcaagccccgattggggcgacggaggtttgcactatggcagatcgattgacaacgcggcggacgtttcttgcggatgcggttctggcgacaggggcgatcgcactttcgccggctcaagttcgtccggcggcgggctccgagggtgagcggatgcacgtcgcctgcaactcgtactcctggaccgtgttctatcagcgtcaagggcgcaatttcgaccagtcgctcgatgaaggtctggccgaggtggctgccagcggtcttgacgggtttgagccgtcgttcggcgacgtcgcacaggtcgagcgtctggcgcctctgctgaagaagcaccgcctcgggatgcggtctttttacgtcaacagcctgctgcatgaggccggccgggccgatgagagcatccggcagatcctcacgattgctccgagggcccgggacgctggagcgcggatcgtcgtgaccaaccccaatccgctcgcctggggcggcgcgcaggacaagaacgacgaacagctcaaggtccaggcggccgcactgaaccggctcggggccgaactgcggaagctcggcctgacgctggcctaccacaatcacaacatggaactgcggcaggccgcacgcgagttccaccacatgatgctcggcaccgatccggccgatgtgacactctgcctcgacgcccactgggtctatcgcggcgcgggcaactcgcaggtcgccctgttcgacatcgtcaagctctacggcaagcgcatccgcgagctgcacctgcggcagtcccagggcggcgtctggaccgagacatttggcgagggcgatatcgattaccgcgccctggccgatgccctgcgccaggagggcgttcgcccgcacatcgtcctggaacaggcgatcgaaaacggctcgcccaacaccatgccgcccctggaagcgttcaccagaagcaccgagtacgtccgccggctctttgcgggcctgggcgaaaaagcttgaacccagacgcacgttccgataaaatggccgcagtgaatcaaggttcgaaggccggccggaattgaccatcatatccgtgcttgtcgctatcatattattgtcgcatatcatcgcaccggcaccttcggagaccttgcggagatagctcagcgtggcttgagggattttcggggcacgggcggcggttccacaaactatggcggcgaacgatgattcgcccgcactatcagccaaaggtacgccccctgtctggtcgaagagaaggcaggtgctggatttacggttattatccattcattcatcccaatctaaggagcggcacaatggcacggagaatcaggtttgcagggtttctggtcctggggctggtggcggcagtcgcccgggcggggaccgtcgatgtgatgatggtcgtccccaagacgttgtacagtggcgcctcgacctcggcgacgatcacggtggtcagcgcacgccagtcgtcggcagggatcggcgtgagtctgcgcctcaaggcccatgaagggaacgtagacctcgccgccgggcagaccgatgaggcagggcggttcgtcgcccgattcgacacgcccaacttggcggatggctcctatatcctggaggcacacgtcgatggcgccgaggagactctgacaactcagatcatgatccggcggatgcccgtggtgttgatcgaaacggacaagccaatctacaagccgggccagacgatccagggccgcgtgctggtgctgacgaacgagcttcgtccgagcgcctccgacgtgaccgtgcagatcaccgacggcaagggcgtcaaaatcttccgcaaggacctcacgacgaacgccttcggtgtcgcgccgttcaacctcgatctggccagcgagctgaactacggcacgtggaagatcaccgccgaatcgggggccggccggggaaccatcgacctgcgagtcgaggagtacgtgctgccgcgattcgaggtcaagctcgacacgccacgggattacttccgcaccgacgagagaatccccgggaccgtcacggcgacgtatttcttcggcaagcccgtcgacggcgaggttcagatcagcgccagtcgctacgtcggtgtctgggaggaatacgctcgctacacggcgccgctgacggaagggcgggcggagttctcgctgcccgaggtcaagtacgtcagcgggaccacgggagccggcggtgcgggcagcgtgcagctcgacgtgaccgtcaccgacacgtcggatcaccaggagaagacgaccaagctgctgaagatcgtctcgtcgggaatcgagcaccggctgatcgcctcgtctcggtcgttcacgcccgcgcaatcgtatgacgttttggtggtggccgagacgcccgacggtgtgcccgtctccgtgacaggacagttgatcggcgagtactacgccgaatcgggtgagatgatctccaaggaggcccattcgctggcgttcgaaggctcgacctcgatcaccctgagggcgccgcagaaggcttcctgggccacactgaagagcgaggttcgaggcgatggcgaaagcgggcaggcggagttgtacgtctatgcgacatactcgcccagcgacagcttccttcatctgagtcgcgaatccaccggcgccgtcggcatgggtgacacagtcacgatcgatgtgtttcgcacgcacgatgcaaccatctactacgatgtctttgcgaacggccataccgtctggtcggacgcggtgaccggctcggcgatccggttccaggcgacgcagcagatggtgccggccgcccgggtggtggcgtacgtgatcaacccgaacaacgagatttccgccgccacgatcgagttcgaggtgacgatggaccacgcagccagcctggccctgggagtcagtgccgaagaggtcgggccgggtgagccggttcgcgtctcggttcgttcggagggtcagtcgatggtcggcctggccatcgtcgacgagtcggtctatgcgctgaacgaaggccggctcaacatgcaggaggtgttcggcgagctggaacagcggttcatggagccgcaggcggaaacgcacgaccagccgtacagctatggcgcccgcaacatatttgaggacgccgggcttgccgtggtgacttcgcgcgggctggatgttcccgagggccggcgaatcaacgggctgtggtggattggtccggtcgtccgaaggggtggcgccgacgatgttgccgagaacgccggcaaaggagatgggttggcggaggtcgatcgggtccgccagttcttccctgagacgtgggtgtggatgccggatctgctcaccgagcccaatgggaccgcgatgctggacctgacggcgccggacagcatcacgacgtggcggcttcatgcggtgtccacgagcgacaacgggcttggcgtgacggagtcgtcagtccgcgtgttccaggagttctttggcgagcccgatctgccgtatgcggtgacgcggggcgagcaattcccggtccgggtccaggtgttcaactacctcgacgaacctcaggtggtctatgtggagatggcggacgccgactggttcaacctgctcgacatcagcgaacagcaggtgcaggtaaatgcaaattccgtgtcgtctgtttcgtttgtcattgagccgacgaagctcggacatcatccgctggaggtccgtctgcgttcggtccggcgggccgatgccgtgcgcaaggaagtgctcgtggagccggaaggcacccggcgtgagctggtcaccaacggcgcgatccgagcgggcgagacggtggtcctcgacgcgaatacgccggaattcgccgtgcccgattcgcagaagattctcctgagcatcacgcccagcctggttgcccagagcatcaacggtgtggatgacctgctcggaatgccctacggctgcggcgagcagaacatgatcttcttcgccccggacgtggagattctgcgctatctcaacgcgaccggccagctcacgcccgaggtgcgggccaaggccgagcacttcatcacggtgggctaccagcgagaactgacattccgccatcaggacggttcgttctccgccttcggccagagcgatgccgagggcagcctctggctgacggcattcgtgctcggcacgttcagcgccgcgcgtgaggtgacgacgatcgacgagacgattctggccgaggcggccgcgtggatcgcctcgcaccaggcatccgacggatcgtggccgccggtggggttcgtatgccacagtgaaatggtcggcggggtgcaggggacgtacgcgctgaccgcgttcgtgtcgattgcgatggcggattacggtatggccgatccgcacgtgcagggagcggcgacgcaatatctgcgtgacaacctcgcgtcggtccgggacgatgcgtatgccctagcaattgcggcgctggccttcgcgcgggtaggtgatccggccgccgacgcggcgctcgaacggctgctggcgatcgccgtcaccgatgccgacggtctgcactggcaacctcacccggtggagacaaccgcctacgcggcgctggcgatgatcgagaaggaatggccgcaggcgaacgaagcggtcaagtggctttcgctccagcgtaacagcctgggcggctacggcagtacgcaggatacggtcatggggctgaaggccctgatgatggcggcccgcagtcagagccgcaacgtggaccttacggtgaccgccaaggcgcggggcggggaaacgctggcgcagttcaccgtgaacagcaccaacttcgacgtccttcagacggcggagctgccgctcgaatcggccgtcgaaatcagcgctgtcggctcggggcaggtgcgattccaactggttcgacggttcaacgttctgctgcgtgacgatccggtccagaaggacatgaccctggaggtgatgtacgacgccgaccacgtggaggtcgatgatatcgtcaacgtcaccgcgacggtgcggtacctcgggccaaaggactcgacaggaatgatgatcgtggatgtcggtgtgcctacaggcttcgccgctgtcgccgagtcgctcgatgcgctgcttgccgacaatctcgtcacgcggtacgaggtggccggacgcaaggtgatcttctatctcgacggcctggaacgcggcgaacaacggaccctgcacttccaagtcaaggcccgcttcccggtgcgcgcgacaattcccgacagccaggcatactcctactacgaaccacaggtgcgtgccgaggctggcggcaatgagatcaccatcgagccggccccgcagcagtaagcgaggaccgtggcgtcaagtccaggcgtactgctgcgggttgctcgcggccctacccggcccgatgccgggcggacaatatcgcatcgcccctcatgtgccgagctttagagcgttcggcgtcggcgcagccagctcaccgcactgacaccgatgccggccaagagcagggctcccggcgccggaattggtggcgtcgtgctgcagatcttcgcccagagcgggagcggaggacaggtggtacggcattcttccgtgctaagcgacgagatgatgctgctggggcaactgccgaaacccagcacgcacaactcgtagtccgcgcccccgacctcaaacgcgatgggatcgaacgacgtcggcagcgtgatgacatccgcaggatggccacccgggccgaccgtttccgtaacgcccagcgtcagggacgtgttgaccggcgtcccctcaaagtccatcgccaggtccagatcgaccgccgtgatgccggtgccgacgactatgggcgtattgtaatggcgcagcgcgcccacgacaaagggcgtatcgagcaccacgtcggtgggcgtcgcgacgggtgtgaagcccaagctgctcttgagaccaaacagataggccggagtgccccaggatatgagctgttcgcccatcaaagaagaccagtaggcaggggcaggggccaaggactgaagtacaggatcgctccaggtgccgctggcgctggaaagcgtcagcgcaccactggcggtgccgacgacggcgagcagcgccagcgccggcagtattgcaggtaaccgtctcatcttgtgtctccttacactccgtgtgtgactctgtggaaaccgtcagcttaccttgtatccgtggaacccccaggcacctcctttctccgggtttctcccacccatccgtacatctcccctttactccgtccggacaaacctcgcccgcacggattttactcatccagacactctctatgtccacatagcgtctgcgtgtagctattccgcgtgagcagaaccacacgtgtattcatcaccgccccatccgggttaaatatacgcgcaatatgggacgccctgcaagcaattccacggaggaaaatgcttattttgatgtgggaagattgggggacatgggaagactgtcggtgacattggtttcttttcgagattccgtgtcccatcggatgatgaggcgccgcacaggatcgggtcagcgtcgggtggaccagcgggccgaccggctggccgatccggactcacagaggttgccgaccacggcgcgcacggtgttgcggagaattgagagaaacccagcgacttacgactgcatcgacgcgagcacgtcttcgagtgacaatgcggcgcagcagaccgttgtgtcggaggcgccatagtagaccttcaaagtcgtctgttcgacgagcaggccgcaggtgaagaccacggggccgaagaagccggagcactcgtattcggtctgcggctcgagaatcggccgcgctgagcgggcccgcaccatccagggctggcgggcgtcgagcaggacggcgccgaggcagtaacgatggttgcggtcggcgccgtggtaaatctccagccacccctcgtcgaggcggacgggcggtgcgccggccccgatgcgggcctcgtcccagaatccgtcgcgcagccccatcaagtggcgatggcggccccagcagagcaaatcgggcgattcggcgatccacatgttgttggtgtgacaaagcggcgagtgcggccgatgcaatgcgtagtatcgtccgtcgaccgtctcggggaagaggacgacgtccttgttttccgggccgaagataacgccgtgacgttcgaaggtcgcgaaatcacacgtcgacgccagcgccgtggtcacccccagcggcgagaccgcgacgtagctgatgtaatacgtctggccgatccgcgtgatgcgcgggtcctcgacaccgaagctctcccaggggtcggccggaccaagggtgggatgctcatcgatggtgaagcggataccgtctttgcttctcgccacgcgcagatgcgatattgaggtcaggtatgtcctgccccggcgcacgatcaaccgaggatcggagaaatcgttggccgggtcgggtcgagtgaacgccttggtgacgatccggccgcaggccgggtcgagaaacgcggtctgcaccacctccgggtcagtctggatcggacgctcggctacgcgcaccagcaggacgatttcctcgccaaggcgggccaccgcgggattgaagacgccgaggacctcgaaatcgccacgcgacggcgttacgtcctgtggggtgaggatcggattggctggatcgcgaaatgctgccatggcgacattctcccgaactctgtcggcggccttggcgtcaaggccacgattgcatagcgaatcgtaaccggtcggatcgtatccggcaaggcgtcggctcgatctcgacgaggtcggcggtgtagacttggcggcccggcggggcaaataacgttgattttcaggccgcgaatggtagaatacagtctgatgcgcatgtgcgaatatgccttcacggcgggcggagtcgcgaggtcattggggatcgacgacggtcccggattctggaacaccagcgtacttgcacgcctgtcaccgcttggattgtcgggagtgaggaatgagtgtgacgcgtgaatcccgtcgggccgctcgtcttgtgctggcttcgtttcttctgagtgtcggtcctgtctcggcgaccccggcaggccggggggcgggtctgccgctggcgatcaatgagctgatggcggccaacagcagtgtcaaggccgacccccaaggccagtacgacgactgggtcgagatccataattacagcgatgcgccgatcgacctggcccgcatgtacctgacggacgatccgggcgaaccgacaaaatggcagttcccaggcggtgcctcgcagccggccaccgttccggcggggggatatctcatcgtctggctcgacggccccacaagcgacagcgggctgcatgcgtcgtttgcgctcgattccgacggggacaccctggcactgtttgcccccgatgggaccacgctcatcgacagcgttgcattcgaagaacagaggaccgacatctcctatggccgctcgcccgacggcaccgggccgtacggcttcctgctgacgcccacgcccggctcgcgcaacagcggcctgtacgacggtctcgtcgccgatacgaagttcagccatgaccgcggtttctacgatatgccgtttgacgtgacgatcacgtgcgagacgcccggcgcgaccatctactacaccctcgacggcagcgcgccgtattcgcaggctcggcaggttcctgccggcagtgtctacaacggcccgatccggatcaccaggaccacgtgcctgcgggcccaggcggtcaagccgcagtgcgtacccagcaacgcggacacgcacacgtacatcttcctggccgatgcggcgaggcgctcgcagtccgaggtgctggcacgtggctatccgagcacgtggttcggctcctacccggccgactacgagatggaccccgagatctacaacagccccgcatatgccgacgtcatggacgatgcgctgctggcgattccgacgttgtctctggtgaccgacagggaccatttgttcagcaagaccaatgatgcgcagaccggcggcatctacatctacaccgggcacagcagcacgggcggccaggattgggaacggcccgtgtccgccgagctgttcagcatcgacggcgccaaggaatttcagatcgactgcggcctgcgcatccagggcggcgaaagccgcaacccgcccaagtgtcccaagcacagtttcagcctccgctttcgcgacgtctacggctcgtcgaagctccggttcccgttgttcgacggcagccccgtggaaacgttcgattcgcttcaactgcgcggcttctttaacaacgcctggacgcactgggatcccggccagcgccagcgggcgcagtacattcgcgaccagtggatgcgcgactcgttgctcgagatggggcaggccgacgccggacgcgggttctacgtgcacttgtacctcaacgggatttactggggcctgtatctggtccaggagcggccggtcgcctcgcactacgccgcctacaacggaggcgacccggatcgactcgattcgattaacggaggacgcgacgcccacgacgtcaccccccagacctggcaacaggccaggagcatcgccgccggcggcgattgggcccggatctgccaggtcatcgacatcgacaacttcatcgacttcacgctcctgaacctgttcgccggcaaccaggatctcaagaccgacggaaactggcgcgccgccggaggcggcgccgacaacaagccctggcgcttctatagctgggacggcgaacgagttcttgagaaggcgaccgagaccgtgataagggatacgttggacccgaccggcctgtatcgccccctttcgcaaatcgaggaattccgcgttcgcttcggtgatcgcgtgcacaagcatctgttcaacggcggcgccctgacgaccgagcgcaacatcgcgcgatggacccgacgggccgacgagatcgacgccgctgtcatcgccgagtcggcccgctggggcgactatcgccgggatgtgcattcctacagttcgggcccctattacctgtacacccgcaacgatttctggatcgtggaacgtcagaatctgctcgacaactatttccctcgccgcaacgaggtggcactgtcgcagttcaaagccctggggctctacccgagcgtggaggcgccggtcttccatatcgacggtgtctatcagcacggcggccacatcgccgagggctcacggctcacaatgacttccaacgccgcaacggtctggtacacgctcgacggcagcgatccgcggcgccccggcgtcagcggcagcacgggcgctgagctggtcctcgtgccggaagcggcggccaagcgcgcgttcgtccccaccacggatatcggcagcgcctggcgcagcgaggtggatttcgacgattccgcctggatcgccggctccggcggcgtcggctacgaacgcagcaccggctacgaggcgttcttcgacatcgacgtccaggcccagatgtacaaccgcaacgagagctgctacatccgcattccgttcgacgtcacacccgaggggttgcaatacgccggcggcctgacgctcaaggcgcggtacgacgacggtttcatcgcttacctcaacggcgtcgaagtccagcgcgtcatgttcgaggggacgcccgcctggaactccggcgccaccgacaaccactccgacctcgacgcggtcgagttcgagcggttcgacctctccggccatatcagccggcttcgcctgggacgcaacctcctggcgatccaggggctcaacgcaggtgccaacagttccgacttcctgatctcggttgagctggtcgcgtcgcaggggggcgcggacgttccagccggtgtcgcgccgacggcggtccgctacgccggcccgatccggctcgatgccagcgcgatggtccgcgcccgtgcccagagcggcagcacctggagcgcgctgaacgaggcggtctacgccgtcggtccggtggccgagagcctgcggatcagcgagatcatgtatcatcctgtcgatccgaacaccgaatacgtcgagttgctcaacatcggctctcagccggttaatctccatctggtgcgcttcacgaatgggatcgacttcaccttcggcgacgtcactctcgacccgggtgcatatgccctcgttgtcaaagacatcggggcgttcgaggcgcggtatggggaccagtcgcccgtcgtcggccagtacgccggcagcctgaacaatgcgggggaaagcatcgagttgcaggatgccgccggccagatgatcctcgccttccggtacaaggacggatggtacgacctcaccgatggggctggctactcgctgacggtgattgaccccctgaccgccgattcggccaccctcgacaagaagggcgcctggcgtgccagcgccgaggtcggcggctcgcccggctacaatgactgaacagagactcgaaacacgaaatccgaaacaagcccgaaatccgcaagctaaaatgaacgaaatgctgacgctgtgccgaaccccgtttcgaattcgcagtttggtgccttcggatctatttcggatttcgtgtttcggatttcggatttaacgcaacgccgtcacttcttcggataggcgtagtaaaacgtctcggcacgggagaaggcctcgacgtgcccgtcgaggaacgcgcagttgccgcgtccgcccagcttgtcgcccgaaggggcgtggtggaaacccgcgatcacatcccagaattgcccgaccccctcgggacccgggatgatgcgacgcaggtcgcctccggtctggctgaaccaactcttgaccatcgtatcgctgccgggggccatgaacgtgtcattgagcccggacatgttgtaggccgtatcgacgatcgcgctctcctctgcgaacgaaaacgtcgtcgcaggatgcttgacgtccgtgtccttgagaacgcgggtctcctgaacgtcactgcgggcgctgcccagataggcgttcatcgtgtagttgtaccagggttcgtagttcttgacgttcttgccataggcgaggaagaactggtcgtcgctgtggcgcactgcgaggttcttgaaggttgggcagatgaatgccctggcatcgccgaggtaccgggccatcatccctccgtactccgggtgactcttcaactcgatgtcgccgttgcaccagcgcagatgcaggtactcggaaatgcctgcctcgacggggtagggtgttagttggctgaagtagcatctctgtggttccgcgaacctgcggtcgttgtcgtcgaggtacatcgccatcgcgatggtatagttcttcaggttgcccttgcaggcggcgccctgggccagctcacgggccttgcctagcgccggtatcaggatccccatgagcacggcgatgacggcgatgacgaccagcagctcgatcagtgtgaatgccttcgacttccgcatgacatggtcctccacgttctcgggaagcgcttacccagacctatcgtctcggcccacccgtctccgggcgcacccggcagggcatgccagtcagggtgcctgatcgcgttgcatcgcggcatttaccattctatcgacagaggttgccgtctgcaagagatatcggtatccgccggccgcccatcatccgtctatggggcggggatcaggcggacgagggccacgccgtgacgcgatacgttggcggcgaagcggctgtcgtacgtgcccaggtccttctgccgccaaaggtcccgcacgaggcgcttgcccgacaggcccagtagcggccagtcgaccgacatctcgcgaggcaattcggccaggttgaacaggcccaccgccagcgagccgtcggccatcgccttggccataatcagagtctcgtcgtcctgcaccagcggcctggcctggatgcccagcgggtcctgatcgacgtcgatcacctcggcattgcatagtacgttgagggtgaattcgtcgagatagcgcatgtcgcccgagtagaacagcggggcggccatcaggcaccacatcgacatgtagctgtactgctcgcttggcgtcagtggggtgggtttgggcggctcatcatgctgataggcgttgccgatgtgcccgatcaggatgtagtcggggtcgttccactgtccgggccgggcgtactcaaagtgccgggcgttgctcaggccgatccggtagaagccgggcagcaggccgccttgttcgaggcccaggtcgcccgtggtgcgccagcagtgcccgccgacctcgccaccccaggtccagacgttgcccatgccgtactggcacaggttcaggatgatgtcccggtcgagactcttgaggatgtcgcccatcaactgatatgggcgcttcaggtgctccaggtctgtgccgccggcgacctcactgtacgagcaccagtcgtgcttgaggaaatcgaaaccccgctcggcgaacttctccgcgtccacccgttcgtgttcgtagctggcgacgtacccggcgcacgtccagggtcccggccctgtgtagaggcctgccttgagacctttgctgtggatgtgatcgaccatgcccttgatgtcggggaacttggcgttgggcaggatcgcgcctttcgcgtcgcggtagggctcatcgccgcgcctcttcatccagcagtcgtcgatgttgacgtagctgtacccgtagtcggccatgccggagctgatcatgacgtcggcggcgtttcgcatgtgctcttcggtgacgtgataatagtggatgtaccaactgttccagcccatcggcggcgtcagcgcgagcgtgtcgccgacgatgatcgcgaaggtgcggcggtcgctgccgtggtcgtttttcgcttcgagtgtcacgacgtactcgcctcgcggcgtgggcacggtccccgtgatgattcccgtgctcgcgtcgagccgcagcgtctcgggcagcccggcggcgccaaacgcgatcggccgcgtccccgtgcaggggatgcggtagaggaacggatgtcccggtcggcagccgtagaccttcggcccattgatctgcggcgccgggcccggcttgggcgtcagcagcaccttctcctcggcagggggccgtggtgcgtcgacggtcgtcggcttgtcaccccccacgatgaactcggcgcccgcccagttggcgtggtcgtaatcgatgccgtcgccgccggaactgaccagcaggatcatctgcgtcacgccagccagcgagacgtcgacacgcttggcttcgtcgttgccggtcatcaggccgctgtcgaacagcaccttgccgtcgccatagaccttgaaccggaccgagccgcgaggcccggtggcgtcgtcgacgcccacccaggcgctgaaccgctcggttttgccgtccagggcgatgtagcagatcgattcggcgtgtgtcgccacgcccgtttcgaacgagcgcccgccgatcgacagcgttcgggcggtgatgctcttgttgacctggggcttgccccacccggtggacatcttcgtcaggtccagctcgcccagcggcaccgttgcgcccgaggcgactaccgcgccgagacagatcagagaacacaccggaatccatcgctgccttacgctcgaacgcatgttcacctcccgttgcctgagccccgtgtttgccgcagccacgatcgggccgcccccgaatcctaccacgatcctgtcgcggcatcaatggcggggcgagcggttcgctcacgttttcgccggcgtctttgtgcttctgtgcgttgccatgtgagcgcacaacaaaggggccggcgtcactgggacgcaggcccctgatcatggacattcgactgtggcgaaccttggcaagggttcactacggcgcgacggtgccgaggaactccacttccgcgatctgcatgttgccatcgctgttggcccgaagggtcgggaacaggatctgatagtacctgtaggcaaccgtgttggcgaactcgatcggggtggttg

SEQ ID NO: 938 - DNA, 128193 bp, Artificial Sequence
  Synthetic Oligonucleotide
gccgcaacctgctgaacgtctcgccgctcggcagcggggccatcgccggctcgacgctggccatcgaccgggtcagcaccgcccggcagttgggcttcgccgacatcgcctacagcagcattgacgggatcagcgaccgcgacttctgcgccgagttcattttcgattgtgctctgatcggcgcgcatctgtcccgattcgcggaggattggatcctgttttcctcgaacgagtttgatttcatccggatcgacgatgccttctgcacgtcgtcgagcatgatgccgcagaagcgcaatcccgacgtgctcgaactgatgcgaggcaagaccggctcgctgtacggcgcgctgatcggtatgctcacgatcctcaaaggccagccatcgggctacaaccgcgatttgcaggaggacaagattcacctgttcgccgccgccgatacggtccgtgcctcgctggagatggcccgggcggtggtggcgcacacgcagttcaagaccgcccggatcgccgccggcctggacgccgggttcctcgacgccacggcgctggccgagtatctggtgggcaagggggtcccgttccgccaggcgcacggcatcgtcggggcgctggtgtcgctgtgcgagaaagacgggcgctccttgtcggatgtgccgttggagacgttccaggaacactgcccgcaagtcggctgcgatgtgtacgagtatctcggggcgcggcatgtggtccagcgttatgcgtcggcgggtgcggccgggcccgaacaagtcaagggccggatcgcctactggaagaaacatcttgctgaacgatgagacctcgcgaagacgatatcacggcatggttccggcagcagagccgcatcgatccggccgcgtttcccatcgggatcggggacgacatggcggaggtgcgcctcaatgagaccgcgtcggtgctgatcaccaccgacatgctcctcgacggctcgcatttcgatctgaagaccgcgacgctcgaacaggtgggctacaaggccatggccgccagtttgagcgactgcgcggcgatggcgaccgtgccgctggcggcggtcgtggcggtggcgctgccgccgccgttcggggcgcgccagctcaaggagcttcacgccgggattacgcgggcggccgagaaatacgactgtccgctcatcggaggggacatcacgtcgtggcgccacgatcatcccttcgcggtcaatgtcgccatgctgagcaggcggtcgacgaacgccccggtgcggcgaaacggcgccagagtcggcgataccgtctgcgtgaccggctcgctcggcggctcgctcctgcgaaagcatctggagtttgaacctcgggtccgtgaggccctgcgcatggcgcagacggtgactctgcactcgatgatggacatcagcgacggcctgagcacggacctcaatcgcatctgcgagcagagcggcgtcggggcgatcattgacgtggcgagcattccgatttccgaggatgccaggaccctggccgatccgctccgggcggcgctgcacgatggggaggatttcgaactgcttttcactctggcgcccgacgatttcacccggctgttgcagacgtgggacgacccgacgccgcttgtccgaatcggccggatcgtcgaaggcacggggatgcagcttcgcatgccggatgggaagctcatcgagctgttgcccggtggatacgaccatttgagcgggcccgaatgagggcgcagaatggaaagaccaatatgaagcacgcacaaggaacgcatcgagcggttgtcgcggcacccattgtcctgttgttgtgccttgtttgcggcggggcggaacatctggatcgggggctggtggccgtaccgcgcgcggatggatcggtttttctcagttggcggatgctggcgacggacaccgaccagacgtgctttgcgctcattcgcacggacgactcggcgtccgaagtccgactcaccgggacgccgcagcgattgacgaatttcatcgacaagggtgcgtgggatccggcggcgtccgagcgacgctacgagcttcgcgtccacgcgcaggaaggcttgcctgtcaaggagaccgcgcacgtcacgatcggcaaggacgcgccgtcgtacatccgcattccgctggcgggcgattacgacttccagaaggtggggatcggtgacctcgatggggacggctcgctcgaattcctcatcaagcagccgaatttcaataccgacccctatcagcggcccggctactggaagcccagcacgactacctataagatcgaggcctaccgtcgggatggcacgctcctgtggcggcatgacatgggctggtcgatcgaggcgggcatctggtactcgccctgggtggtctatgacgtggacggggacggcagggcggaggtgtactgcaaggcgggcgaaggcgacccgcgtgacgagaaaggcctcgtgcagaccggtcctgaatacttggtcaagctcgatggccagaccggacgcatcgtggcccggaccgactggctcagccgggacgggtaccccgactataactattactgtcgcaacttcctggccgtcgcgtatctggacggacggacggcctcgctggttatgcagcggggcacgtataacctgatcaaggttcaagccctggacaaggacctccagcggctgtggtattgggactcgacgcaggagcagacgaagtattccgggcagggttcgcacggcctgattgcggccgacgtggatcgggatgggcgggatgagctggtccttggcgccgctgttctcgacgacaacggcaaagggctttggtcgctggcgatgggccatcctgatgtctgttacgtcgcggatattcatccgtccaatcccggcctggagatcttctatggcttcgagacgcgccagcagaccgatgggatgtgcgtggtggacgcccggacggggcgcaaactctgggcgcacaaggagccgacgttccatctgcacggccagggcatggccgctgacgtgctcgccgagcatcccgggatggaggtgctcgcgggggaacgcgactatccgaagcgctggctctacagcgcctcgggcgagttgatcgaagcgaacggcgagcggcccctgacgccgcggccgctctggtgggacgccgacccgcagaaagaggtcatcttcggccgcgcgatcgggaagtggaatggtcccaccatccagccgattgaaggacaggtgatcgtcgtgatggactgcctgggcgaccaccgcgaggaggtcgtcacgagcgttccgggcgagctgcgcatctatacgacgacgattccgacgcacgagaggcgtccctgtctgctgaccgatcatcagtatcgcatgggtgtcgtcgcgcagacgatggggtattactatcccgcacaactggcgaccgaattctgaaatccgaaatccgaagcacgaaatccgagacaaatccgaatgtccaggacggaaaatccgaaacgaacgtctgaccgccgccggcgtttggggccttcgtgctttgggtttcgaatttgtctcggatttcgagtttcgtgcttcggactttcgccacgacgggcgagcttgtactcatgagggaagtcaccatcacatcgaattcgccggaacagacgatcgcgctgggccgggccctgggtcgccagctcgccggaggcgaggtgatcgcgatcgtcggtccgctcggcagcggcaagacgcatctgatcaagggcattgccgagggcgccggcgccgccgaccgccgggaggtgagcagcccgacgttcgtcctggtcaaccactatgccggccgcctggacctctatcacatcgacgcctatcgcctggattcgatcgccgagttcgagaggctcgggtttgacgacctgtgctatccggaatcggtcgtgctgattgaatgggcggaccgggtcgagccggcgattgccgctacaaaccctgtgcgcatcaccctggcgcacgccggaccgcgcgcccgcaccatccacatcaccgatgcccccgagtatctccacgtctgttaatgccatgctgtgacaccgcagggtggggcgtgcccaccatttgcctgtagattgtgcctgggcctggtctatggacggatttctccgctccgcttcgctccggtcgaaatgacaaagaggggggatgctgcggtcgaaatgacaaaaggagaggcatcgcggtcgaaatgacaaagaggggggatgctccggtcgaaacggcaagggaaagggaccctgcggccacggctctctttgtcaccccgagcgcagtcgaggggtctggccatgaacgcggtgtacgctgggtctcttgagggccactttgacgcggcctgttcctcctcgtgcaggcgccgcagttcagaaccatccctcgctcaggtcgtgccagtcgggattctcggtggcgacgagcgccagtttcttctcccgtcgccagtgtttgatctgtttctcgcgtcggatggccgcgtgaacgtcgccgaacggctcgaagtacacaagcgtgccgatgtggtaccgacgggtgaagccctcgatttcgcctgccttgtgctcggcgatccgccgtcggatattgttcgtcacgcccacatacagcgtccgagattggttcgatgcgatatagacgtagtagactttccccatcggcatgacaccatcgtactgcatgtggccatgcgatgccagatttctccactgcggtcgaaatgacaaggagaggggacgttgcggcgggaaagacaagaagggggccgagggtctcggttggcatgacaagtcgggagaaggcgagtggggacgctcgccctacgctttttttttcgtctgtagttttgcacgtgcggggggtgttttctatggtttggatggactgagaggggccgcagataacgccgcccgacctgttttcgggcgacaaagttaaaggctccgaaatccataaggaaacggaacaggggttggatgtaattcggagacagggaattcacacggtcatgttttttgaaagggtctgcggctcaaaagaaaagtggcaaatcaagtgaccttgcgattcggtcgataaggttcacggaacaagcgacgaacaacgtcgaatcaacccatcgttttccatgtttctttttcttacgcacaacgaggaggacaacaaaatgaaggcaaacagaggctttacgttggtggaaatcctgatcgtcgtggtcattctgggcattctggccgcgatcgtggttcctcagttcacccaggccagcaccgaggccaaagagaacagtctgtgcagcaacctccagtcgctgcgttcgcagatcgagttgtacaaggttcagcacaacgataatgcaccggccttggccacctttgagcagcagatgacgttctgcaccgacatcgatgggaacatccagggcgcaggcagcaaggtgcgtgatgccaccaacggctttatctatggcccgtatctggaaagagttcctgccaatccgttcaacgacctgaacacccttgcggcgatggctgcctccggaacgcctgctgcggtcggagacaataccaccggttggcagtattttgaggataccggcgagatctaccccaacgacgatggatccaccgcgagcggcacgccgcacgcctcgctgtaacaccgccagaatatctgtgtcatcgccagcaacaatctgatagctggttgacatagaggtttgatgaatcaggctgaccgggccaaggccgttgccgaaagccggtcagccttcttcgtaccaccgatgccgaagggctgcatgcctgcggccacatgaggaaagaggagggacgggatggtttgccgaagggcgttcacgctgatcgaagcgacgatcgtggtgatggtgctggcggtcgtagcggcggttgtcgtaccccggttcagccgggcgggcatcgccgagaatcggatggacgatctgtgcaaccacctccagttgctgcgttcgcagatcgaactttacaaggtgcagcacggcgacaggccgccgatgcgatcggccgacggctcgatcgtttgcgatctgggattcgatcagatgctctattgcaccgacgccgacgggaccgtgaagacagaccggccacggacccggcgggacgaggtgttccgctatggtccgtatctcgaagaggttcccgccaatccgttcaacggcagcgggaccatcgttgtggtgcgtgaccggaaggacgttcccgttccgggaaacgccggctgggcctatgtgcccgagaccggcgagatctttgccaacgacagcgttcaccatgcgggcttgtgatgcgtcgaaacgaagaacattctccgaagggctccgtgcccattcggtttacccatacacggcggtgtgctgtgtgaatcgaaaggaagaccatgtgtagagggagagccttcacgctggtggagattctggtcgtggtcgttctgctgggtatcgtggcggccgtggtcattccggcggttgcgaacagcggcacctcggcgcgggccacgacgctggcaaccagcctcaacatgctgcggcggttcgtgttggtgtacaccagccatcatctggaggtggcgccgggctatacggccggtcccggctcggcggtggatgccgcggtctttgccgatcaggcgctgctgtcgagcaacgccgagggacagaccgccccgcgagggaccatcggcttcaaatacggaccgtatctgtcgaagattccgacaaacccgttcaacggcctggcgacgatccagatgctggccgatggacaggatttcccggccgccgccgacaacagccatggctggatctacaaggcgcagacgggcgaaatccgacccgacaactccggtacggacgacgcgggaagagcatactatgactattgatcccaatcgacgaggcatcgcggttcggcgcggttttacgctggccgaggcgacgttcgcgatcgtgctgctggggatcgccgccacgggtgtgctgctgccgtttgcgggcggtgcgaccgtccaggcggaaggcgtgcgccgcacgctcggcacgaggctggccaacgacctgatcgagcggatcgtgagtaccccgttcgacgacatcctgggcctgtacgccacccacctcgaatccgaggggcaggtaggcgacggcaccgatccgatgtatgccgagtacagccggcaggcctcgtgcaaatccgtccgtgtgcccggccagagcgacgacgctgcgccgagattcatcctcgccagggtctgcgtggcgtatcgggggcgaaatgtggcgacgatctatcgtctgatcagtaagtgagtccagtgatttgaattgaggcggactcctatccgattgcgggcggcgattcacggggggagcggattgacatccgcgccctcttgtcatgtcgaggcccggcagggcggccaaggcgtccgagggtagaacggcacgtgccggacaaagatcgcatgaaccgaaacgggaacatcaaggcgtttacgctcgtcgagttgctggtgaccctagtcatcaccgggatcatcctgtcggccgtcgcgacgctggcctacgcgatgagcagtgcggccagggccggcggcgatgcggcgctgtcgcagggccagcttcgcctggcgacgttgcgcattctcgacgtggttcaaaactgccggatggtcctgaccgcatccgacaccgaactggcgatctggcgcagcgactacaacgccgacgggcgcatcaacgtcaacgagctggtcttcctcgactgcgccgcgacgcacgatgcgctttgcctggtgcgttcttcttccgccagcaatccggaggtgaccttcagtggaggtgtcctttcggtcagtcaggccgatgtgatgaacagttatgcgggcgtttcccagccgctcctgtctgagtgcaacagcgtgcagtttggctgggatgttgctcctccgtcgacccggcgggtgacgatcgcgtttgagctgacccagaacgacggcgttcacaagtacgagatcgaggcggccctgcgggcctgggccggccacctgctgaacaacacggccgacgggctggtaaccgaggacgatgatgagtaagcgaccccggacaactcgatcttcccgcaaaggcgtggcgctgctgctggtcctgggcatcatcatggcgatcaccctgttgtcgctggggttcatcgcccgctgtgacatggagttggcctccgggcacaacatggccgttcgcaccgagttggatcaggtggcggtctcagccctggaacacgcccgcggattgctcctgaatccacaggacgccgaaggtccgttctggaccgggggcacgatgcgccaactcgacccgaacacgaacgatttctatgacgtgaccgttgccgccgatccgagcgacgaatgtaccttcgatgtcacgtgtgaggcgtatcggctctgcggaggcgagaaggtggccacccgcgccctggccgccgtcgttcgcctggaccccgccatcggcatctggagcggaaccgatctgtcctttcgcgcaacctggagcatgatcggcgacgtgtacacgcctgggacgttcaccaatctgggtgctgccggggccgtagacggtgacctcttcgccggcgccctgagcggaggcattgtcggaacgtataagggtgccgggagtctggcactgacgtggccccccgtgacggcgagctacagccatccggactacgtgacctcctccattggacccggcacggtcagcgccggaagctacagctcgccaaagatctggcggtgcgacggggatttgaccctcagcggggcggttgtcgtcaacggcatgttgctggtagagggcgatctcgtcatcaaaggcagtggagcaaggctcaccgccgccaagaacctgccggcggtgtatgtgaccgggaacctcatccttcacggcgccaccagccttcagatcgagggccttgtctgtgtggacggcgacgttctcgtgggacatggcaccaaggctcagatccgcggcgcgctattcgccgctggcgagatctccgaggccgcgattgattccgccgggttccccaacgaggctattttgcggaacataccgacgtggcccggcaacggcttgctggaactcgatggcgaggaccagtacgttcagacgctggacgatgaaacgactctgcaactgaccggcgactacacactgatggtgtggctcaagcccgagctcgttcagaatccgtgggccggagtcctctgcaagactgatccaaccggaagcgtgaaccactgggtgcttcagttcgacgaatctgcttccagactcattgtcctgcacgggacaaccgcaaccaggtgggacacgggaatcacgttggctgattttgccgacggggggcacggtgtcagtgtgatccgccggggaaacgatatgaagtcttatctcgattgggtcgaacgtgcctcgggcaccctgtcgacgtcgcctgggattggaaaggggcacctgaacatcggcgccgaccgcacgggtgataatgtcttcaagggacaattggacgacgtaagtgtgtacaacggtgcgtccctgatcgggcgctggaccttctattcgagcggctccgagctgaatgtggttgcatcgcccacaagggcagcaatcagcacgtgggcttcggggaagcgggaagactggagcccggcgggaggggcttttttccgaagcatcgattcccggcaagagtgaaatggcacagcggatgatcaggtcccagaacacaaaacggtttatcggtccactggaggccgacgggaaaaaagcccgagttgcagcagcctgcggcggacgcgcgtgcgtcaaaggctttgcccaggccgcctgtttgacgcgacaacacgtagcggttgagagggcttttttcaggacgttgaccgcgtcgcaaggcgcttctgacgcctgtagggactgcctgggatctcgccgccggatagcagacggcggtcgcgccggtgatcttgcggcggccgtgcgaatcctcgcatatctcggcggaccggtccgatcgcaggttaagccgacttgccggcaggtcgaaagagaaacggaggtaaagttgaccatgggtaggaatacgacagcacaatctgttgggcaggccgcagggtcttgtgccggattcacgctgatcgagctgttgatcgtcatcgtgattctgggaatctctgcggcgatcgcggtgcccatgatgtcttccgcggcgagcatgcagatacgcgccgccgccggcattgtggcggccgacctcgaatacgccaagagtctggccatcaccacgggccagcggcacaaggtggtgttcaacgtgggcaacgacagctacgaaatccgcaaggttgtggacgcggtcgatgaggcggtcaagcacccgatcacgaagaagagccagtacgtggtcaatttcgccaccgatggaaggctggatcgggtggagatcgacagtacgacgttcaccggcgatgccgtgacgttcgatccgctcggcagcccggtaggtttgcttgctgaaggtgtggtgactctacatgccggggatttcacccggaccgtgacggtcgaacctgtgacgggattcatctccgtttccgaatgagtgattttgatatgcgactgtcccactggataaacaggaaagagaagatcctgcccatcgggctggacatcggacacagtgtcgtcaagatgatccagttggcggtgtccgacgatggggttcgggtgcttgctgccggcagagcggtcgtcggtctgaatgatatgagcgacgataacgcatggcgacagcgggtggcgccggccattcggcgtctgctggccgagggcgccttcaagggaagggatgtcgtcacagccttgccggcagacaagctgagaatcacctcggtgaggctgcccgagatgccgaatgaggaggtggagcagacgcttcgcaaagaggcggcccatcgattcgcgctgaacccgaagatcgacgccatcagctatgtgctggcggggaacgtgcgacagggtgacgaactcaagaacgaatacatcctgttcgccagcgacgatgaggcgatccgcggtcatattgcccttctggaagaggtcggcctgcaaccgacgggcatcgacgcatcgccctgcgcgctgtttcgttgttttgagcgggtgatgcggcgccaggaggacaaggaacgcaccatcatgttcctggatgtcgggcatcggtacaccacgatcgtcctggggcgggccggcgagatttgcttcgtcaagcagatggcgttcggggccgcccggttcgcagaagacatcgcggccaagctgtcgatctcggtgaccgatgcggaggccttgcgccgccagatgatgtccgacgactcggtcgatgcggcgacgcgccggctcgtcgttgacacgctgcacggcaccgcggagcaactggccggagagatctcgttgtgtcttcggtattacacggtgacgttccggggcaaacgagtcgagcgggctctgatggcgggaggtggtgtccacgaggaggccttgctcagcgtgatgaggcaccacctggccattgaaacggacatcgccgaaccgctgcgcgggtttgatctgacgtcggtcggggtcgcgatggaagacctgtatccggcggcggacttctcgctggcggtcgggctgtgcctcaagggatggggcgcttccaccgtgtccctggtgaaatcggatgtcggactggaatccatactggaaggtgcatcctagtgaaagagatcgattttcttccagaatggcatagagaaggcagacgtcgccgccttcacatgaggcggcaatatgccgcgctgatcgtcttgtttctggccttggtgacatacaacgcggtagccacgcacaggatcgcgcgcgccaacgcggatctggccaggctggaggaccgacgattctgggcggaaggtctggtgcatgagtacaacatggtcacacagcagttggccgcccgccaggccaaggtcgcgttgatggagcaggtcgatgcgcgcatcgacctggcggcggtgctggcagagatcagttacatcatcggcgaccgggtgctcttgagccgtctggagttcacgtcggagcccctggccgctgcggaaaagacctcggaacgggacaagaccgcggtgcgtagcgccagcccctcgcgtgcgaccgccaagacggcctctctggggagggtgcggtttcgggtggccctggcgggaatcgcggtcgattcggccgaagtgggggcgctggtccgtcggttcgaagagtccccgtacttccaactggtccatccgctgtatcgcgacaacacgattcagattggtactggcgaatcgtcgggttcgcgtacgagtgagaacgaggcccgacgtgtggagacgcgctcgatcagtgtcacggagtttgagatcacgtgctatctggccaactatgaggagcgggacacgtgatgagcgagagacgatccaattcctggctgagtcggcagcagttgtgggtgttcgccatcggcggcctgttcctggcggacttcgtcctgtacgggtatctgccgttacgcgaaaggctccagtctctggggcaagcgaaaacgcgtcacctgcagttgatctccaccgccgaggcgcacagccacgtgctgccgtccctgaccgcgcgactgagagagaccgatcggtatgcccggaactatgaggattggattcccaatgaaagtgccctggggcaattcctgggacagatcgcccggatcatgacggaaaacaacctgtcggaccaggatgtggtgctcggtcaggaacaggtctcgggtgacctgatctgtataccggtccacatgaagtgtgtggggaacctgaacggaatcttcggattcttccaggaccttcagaacctcggtcggctggtccgcatggagaagaccaccctggccaacacgaaggccttcaacggcagcgtcgccatggaggcggacgcggttatcttctatcgggcgcggaagacgcaggacgcgagcctgtccgcgaaccagaaatgaacggacgccgtgaacgatgaagcgtaatgccgccaatccattgggctcggtttcccggatgacgagccacctgatccgaggtggcaggaagacgggcctggcgatggcgctggtggtcgtgatggccgggatgtggttccgcgtcctgaccggccagagaccgcgcggggtggaagccggtccgaatcccgcgtcgcagacggaccaaccgtcgaaacaggagccgcaggtgcgcctcgtccacttgcccgtggagcccgggcggcatgaccgcattcacagagacttcttcacgacacaagactggagcggctttgccacggtatcccattcacagagcacgggtcctgttccagaagtacagccagtgacacccactcgaaccaatgacgtgatcgacaaattggccaagaccctcaggctggaggccgtgttatggagtgcggacccgcaggcgttcgtcgacgatcgattggtacgcctcggggataccatcactcttcgagacggctccgagacctacgcattcgaagtagtacagattcaagaaaatgccgtgcttgtgacctgccgcgaccgacagtggacgctgaagctgtcgtcgcccaccgacgtaagaaagtgacgcattggtcttagaacgataatgaaatcagtacaaccaagcaggatgtggaagaacaggagtaaggttatgcattacgacagaacaactgtgaaatcttgccaggcccggtggggccgacggctttgcgtgctggcggtgctggccctgttggccggacccctgacggccgccgagagcgatccggtggcaccgacgtccgaaacgacgctcgatacgctggccattgaacccgatcaggcccaggtggacttctccggcgacggagtcgtcatcaagttcatcgcgttcaagaaggacggcgatgtgcgggacgggctgcgtctgctggccaagctgtgccggaaaaacatcgtcccttcggccagtgtgacagggcccttgaattgtccggaactgcgggatgtgacgtttgaacaggcgctggcggccatgctgggcgacaagttcgtcccggtgcaggacggcaacctgattcatattcgcaccaaggaggaacacaagaagatcaaggaagaccccgaacggatgatccacaaggtgatcacgctgtactacacgacggcggaagaggccgagaagctgatccgcccggtgctcagcgccagcgcgcagatcaccaagacacaggccgccgaagagaagatctcctccgccagcagcacgggttcgggtggagggtctctcagtggcggcggcggcggtgacaacacggccaccaacgacatgatcgtgatcttcgacttcccggagaacatcgagaaggccgagtcggtcattgcgcagatcgacattcggccgaagcaggtcctggtcgaagcgaccattctggccgcccggctgaccgaacagacacagttcggtgtggactggaaccttctgagcggcgtggctgtcaccggttttccggcgaacattgtcggaggccagggtacgccctgggaaaccagcggtttccgggttcccaacgcggccggcggtctgcgtgtcggattctcgtccgacaacgtccaggccatcatcacggccctggaagaagtcacggatacgacgctgctggccaacccgaagatcctggcggtcaacaagcaggaaggctcggtgctgatcggtaagaagctgggctatctggatcagacgacccagacccagacctcgaccacgcagtcggtggccttcttgaataccggtacccagttgatcttccggccgtacatcggcagcgacggctacatccggatggacatctatccgaaagacagcgacggcagtctgaacgcccaggggattccggacgaaaccaccacggagttgcggaccaacgtcatcgtcaaagacggggaaaccgtgattctgggcggtctgttccgtgacagcatcacggctacgcgcgcgcaggttcccttgctggggagtctgccgatcatcggagccgttttccggggcaccgacgacacctcgctgcgggaagaagtgatcatcctgctgacgcctcacatcatcgaagagccttcggaggtcggcggcgcggaccgtgccgacgatatccggctgaagatggacggcgccaagcacaacctgcagggcctcgatcgcgcccgcatggcggaggatgcctacgcccgagcggccaagtactatctcgaaggtgatgtcgacagcgccgtgtacaacgtcaaggtcgcgctgatgatgcgtccgacgtatctggaggcgctgcggctgagggaacggattatcgtagaaaccgatcccgaggaactcgagcggatcgacagcatcgtccaacaggcgattgatcagcaagaggcccggaactggaagagacgctgacgcgtcttccctgatcgaaggtcatgcccgtagtctacgggttcggaggagttgttgtgagacgccaaagacgcttagtctgggccgcgattgccatggtgatggcctcgctgtgcatcgcggccctgaccgggcctttccattctggcatcggagtagggtggcgcaaccatctcgttgcgtggcgtcttatcgcctgctgcagcggggctgtgggcgtgatcatcctgggtctggcctaccatcggctggccggggcgattgcgtccatagcccggcagctttcctgcgacgcggccggctcgatggatctccaagccgtcgagcgggcggccgcgacggttcagacacgcctccaggaaggccagaaagcccttcgcacgctggaagccgaactgggcgacctccgcattcgatctcaacttgccgatcgacagaagcagcacaccgaggcgatcatttatagcctgcgcgacgccgtgctcgtggtggatgagtccgaccggctgctgatggcaaacgcggccgccgcccagctcttcgggttcgacccggagcaggcgcgctaccagccgcttgagcagagcatcgagccggcgcacaaggatttcgttcagttgattcagcgttgccgggaaagcgccacggaggcgacgcgtcgcgagatgcagttcgtccggcccgatggtccccatacgttcgacacgatcgtctcatgcgttctcgagcgggaccgggtcttgggggtggtcgcggtgctgcatgatatcacgcgagaaaaggaagtctctcagatgaagaacgacttcgtcagtcacgtctcgcacgaattgaagacgccgctggcttccatcatggcgtattcggagatgctggccgacggggaggccgacgatgagcggacgcgcaaggagttctaccaggttattcagactcaggcgcagcggctcaaccggctgatcgaggatattctcaatgtctcacgaatcgagtcgggactgatcaaggtccagaaagaaccggtcagtctgacgattctgattgaacagcagatgcagatgatcaagggattcgccgaggagaagggaatcacagtcacggggcagaaacccatcgtgtacgaccaggttctggctgacaaggatatgatctcgcaggtgatcgtgaacctgctgagcaacgcggtcaagtacactccccccggcgggaccgtgcggatccagacggaggtgaacgagatcgaggaggtggtccgcgtcaccgttacggataccggcgtcggcattcccgccgacgagatcgctcacgtgttcgacaagttctatcgggtgagcgccaacaacaagcaggccaaagggaccggtctcggcctgaacctcgtcaagcagatcgtcgagaaagtacacgacggtcgtgtgttcgtcaccagccaggtgggtgttggaagcaccttcggattcgagctgcctctggcggccgccgaactggccggcacgacccgataacggcggagtttacgcctcttcacggagaggggattcccgaaacccagttttggagtggatgaaaatgacaggcaagaaggtgctgattgcggatgatgagatccacattattcatgtcgtggcgatcaagttacgcaacaacggatacgaggtgattgcggccaacaacggagccgaggcgtatgaactcgcatgccgcgagaaccctgacatcgtggtgacggattaccagatgccgttcgtcacagggctcgaactgatcgagaagctgcggaagaacgaggccacgacgcacattccggtgatcctgttaaccgcacgcagcttcgcgatcagtcaggagatgcaggaggcgctcggcgtgcaggagtgcctgagcaagccgttcagccccaaggaactgcttaagacaatcgaggacattctctatcagcgtgcggttgcggtgaagaactgattccacggccgcgacgatggacgacgcacggcatacggtgaggaaccctgagagggccatgctgaccagaacgacaccaggactgacctgtctgcaacgacgcgatctggagcggttcggagagcgcattgtgcagtttggtgtgaatgtctccgtggttgacccggacggccgcatggtggtcctgcgcaatggggggcaattcgacagcgatccggaggcgatggaggaggcggcgcgcgccgtctcgcaagccatggccagacatccggccgaacgttgtgagggccgcgtctgggagttctgcgaccgtcggaagctgctggcggttccgttgtgcctgccttgtgcggcgaccgccgaccatatcctggcgggcgtgatcgtcgccgatgagggcccgccggaggccggcgcgtggccaggcgacgggatgcgagagagccggacgagcgattcgttccggttctcggcctgcctgcgcgaaatgctccagctcatggcgcagaatttccagctctccgcgcgcagcgacgggcagatggaaaagatgggtacggaactggcccaggtgtacgaggaactggtgctgctgcacaagatcagcacgcacatgaaagtcaccgagtcggacagcaccttccttcaactggcctgcgacagcctgacggacatcgttctggtcgagggaatcgccgtcgtgctggagcgggtcatcgacggagagaagcggttcatggtggccgccgggtcggggctcatcgatctggacacccgcacggccgctctgctgcacagtcgcctcacggaagagattcgtcgaggccaggaggctctgctggacagcgcgatcgacaggccattccggtatgaatggcctgcgagcatccggaacatcattgcggtgccgctgtgcgcgaaggagccgcagcattcgcgtcgaacggttcgtgcctcgaatgcggtggcgatcatcggatacatggtcgccgtcaaccgcatcgacaagcccgatttcgacagcacggacatgaagctcttcggctccgttgccagtggctgcgccgtgttcatcgagaacggacgcctgttcaacgatctcaaggaactgttcctcggttcgttgaaggccctgacggacagcatcgatgccaaggaccagtatacccgggggcattccgagcgcgtcgcggtcatctcacggtggctggcggaacgcgtcgcggaacaggagcctctggaggacgagcagattcaccggatctacctggcgggtctcctgcacgatatcggcaagatcggcgtggacgagaacgtgctccgcaagaacggcagactgacgtccgaagagcgcgagatcatccagcgtcatccgtccatcggggccgggatccttcgcggcatcaagcagatgcgcgacatcgttcccggggtgctccagcaccacgaacgcgtggatggaaagggctatccggacggcttggtgggcgaccagatttcgctgaccgccaagatcctcggactggcggacagcttcgacgcgatgacgtccaaacgggtctaccgcgatgccatgaccctggatcgggcgctcgaggagattcggaagggcctgggaacacagttcgacgagaggatcggccgcatcttcctggagagcgatatctaccatctgtgggacatgttacaggaaaacggcccggcgatgtacggtgcgggccattttgctgattatgggacgacggcgatagggactttgttgcgatgaagatcaacctgcagaactacaacgacgtcacggtcatcgagttgcagggtgaactcgatggagacatcgaggaatcgatgaaggacacgatgacccagaccgtggccgcgggccgcaaacggatcgtggtcgatatgagcaacgtcagcgccgtggatagtcagggactggagctgttgctgtgggtgcggcaatactgccggcagaaccgcgtgcagctccggctggccggactcgatgagaccatcgagaagatcctcgagattaccggcctccagaccgaattcgaccgtcacgtcgagttggccgaggccgtccgcagctttgcctgatcgccgagggcatggggaccgtagggtatgagtcagattctgcttgagaacaagatgcagctcggccagcttctgctggcacgaggcgtcgtcagtcaggagcagatcgaccgggctctggccgaacagcaggagaagggccatcacaaactgctgggcgaattgctcgtcgagatgggctattgcagcgagaaccagatcgcggcggccctggccgaggcctatggggttccctacgcgcaggtcagcccgaagttgtgcgatcccaaggcggtggagctgctgccgcgtgagtttctcgaggcacacgtcgttttgccgctgttcaaggtccacgatgttctgactgtggccgtcaacgagccgaccaatgtctttctgatcgacgagatcgagcggatcagcgggtgccgcgtccgggtcgtctgctcgaccaccaaagacatccgggcgacgcttcagtcctacctgccggccgccaacgtgtttgtgatcgacgatattattgacgacgaggggctcgaagagtttacgctcatcgagagcatcacgcaggacatcagcaatctcgaagaggtggccggccaatcccccgtggtcaaactggtcaactacctgctgtacaacgcggtgcgcgagaatgccagcgacatccacattgagtgcgatgagaagcggctgcgcgtccggtatcgcgtcgacggcaagctctacgagaagatgcgtccgccgtatcagatgcacgccgcgatcgtctcccgaatcaagatcatggccgaactggacatcgcgcagcgccgtcttccccaggacggaggcattcacgtcctggtcgaaggtcgtccgatcgatctgcgcgtctccgtcatgccgggcaatcacggggagaaggtcgtcattcgtgtcatcgatcctcagaagatcctctacaacctggaatcgctcggtttcacctacgacaatctcctgcgttttcgccaggtcattcaggtgcccaacggcatcgttctcgttaccggcccgacgggctccggcaagaacacgacgttgtatgccgcgttgtccgagctgaacagcgaagaggtgaacatctgcacggtggaagaccccgtggaatgcaacatctccggcatcaatcagttccaggtcaatgccgcggtcggtttcgagttctcgacggctttgcgaagcctgttgcgacaggaccccgacattatcatggtcggcgaaatccgcgatcaggccacggccaatatcgccgtccaggccgcgctgaccggacaccttgtgctctcgacactgcatacgaatgatgccccgggtgcggtgacccgtctgctcgatctgggagtagccccctatctggtcagcgcttcgctcaagggcgttctggcgcagcgactggtccgcaaaatctgctcgaactgcaagaccgaatacgacccgccgcccagtctgaagaaggccgtacaggcccagggtggcgaaacctgcaagttctatcgaggggtggggtgcaagaagtgccggaacaccgggtatgccgggcgcatcgccatccacgaactgctggtgccggacgacgaaatcatggagatgatcaatgaacgcgtcagcgccaagaagctccgggccgcggccttggccaagggcatgacgccgctgcactttgacggcatcgaaaaggtcaaggcggggatcgtgtcgattgaagagatattgcgaatcacggctctggatacgacggggatgggcgaatcctgagaccgatggaatagcgaagtgggcctatggcgaccttgatgacagagatgcgaaagaccggccccgacggcgatacgtcggcggcgggggccccggaaccgaagccgggctccggcggtgccgcgccgggtgcggcggacccgggaccgatgggaaaggtgcgcgccaagagcggcgacctgattctcttcacgacgcagttggcggtcatgctcgacagcggtgtcattctcagtgacgccctcgacgcgatcggggaacaggccgcggacccgcgattcaaagccgttattctggacctctcggatcgtgtcaagggcggcgagacgttttcccgcgccctgacctgctacccgaacacgttcaacaagatgttcgtcagcatggtgaaagcctcggaggcttcggggcgaatggtcgagatgctgtcggtcctgaccggatacctcaacttcgaggccgacacacgcaaacgcatcctcggcgcgctgacctatcctctgatcatggtactgatggcaatcgccgccaccggcacgctgatgttcttcgtgctgccgcgtttcatgcggatctatgagacccgggaagcggcgctgcccaagctcacccaggtactcgttcatatcagtcatgttctgggcaacggcgagatgatggccgtgctggtgaccaccgccatcctgctgggcacgggcctgtacggctggtcgcacaccgtttcgggacggcgcgtcctggacgggatgaaaatccggaccccggtcattgggaccatgttcgtggacatggtcgtcacgcggagcatgcggatcatggccacgatggtcaacacgggggttcgcctgctggacgcgatccgcgtgatccagggctgtgtggacaattactacttccagcaactctgggaggaagtggacgacaagattcaggatgggtaccagctttccgaggccattctcatctccgagcgtgccaagctgattgcgcccggcatcatccagatgctgcgggctggcgagaaggccggtcggctgggcgaggtgtgcgacaagatctccgtcttctacgagaagaggctggcggcctccattcagagcgtgatgacagtgatcgagccgctgatgatcacccttctcggggcgatcattggaaccatcgccattgcgcttctgctgccggtcttccgcgtctccagcgtgattgctcactgatcgggcatggccacggaggcaagcaccttgcggcacgtgcagtggttgcccaggtggcaaagcgccaactgtggtgcgacaaaatcgatcgggaatgtcatgggctcggtcaccacgccgtacccgatcgtgatgtgcgggaagaacgcctcaaacgcggccttgcggcggtagtcccgaatccacgccagcgtactcggcgctgcctcgtcgtcgccgcagagcatctcggcggttacgttgccgctcagggggggctcccggatctccaggatctgctcgtgcagcctctggagggccgcagttttggccacggcaaagagcgagttcggctcgttccgcgcattcagcaccgtcacgacccccgtgaccgtgagcttgccaacggggcaggccttcgcgatcccatcgagcctcttctggatcgcatcgacctgatcggactcgatgcaacccatcgccagcgagatgtgcggcaggcacgtggtctcggcgagcacgatctcgcgacaatggctgccgatcagcttgcggttcgtctcgatcgccaattgcgcgatcttcgcctcaggcaagagcacgatatcgacggcgatctggctcatcgtgtcctttcttgcatctgtgcaacgacctcatcgaattgccgcaacaccatctcatcggtctgttcgatgaatcgagtgacgatggcgatggccacacagttggcgacaaaccccgggacgatctcgtacatccgttcgctcatacccacctgcttccagaggaccagcgtgacggtgccgcagaccatgcccgccagcgccgccggccagcttgttcgctttgagaagagcgcaaacagcacgaggggtccgaaggctgcgccgaatccgccccaggcgtaggcgacgatctccaggatagtctccgtcttcacgcccagggccaggatcagagccatcagcgagatgacgaggacgcacaggcgccccacgaggacgacttcgcgcggagtggcgtcgcggtggatcgcccggcggtagaagtcctcggtcaacgccgatgacgagacgagcagttgcgaatcgatcgtggacatgatcgccgagaggatcgcggccagcatgatgccgcccagccacggacgggtgacttcggcgatcatgtagatgaacaccttctcggggtctccgcccggcacggtccgaaacagcccgatgccgatcaagccgatcgcgacggccccggccagcgagatgaatacccagaccatcgcgatcaccatcgaccgggagagtctggcgagcgatttgacgctcatgaaccgcacgaggatgtggggttggccgaaatagccgagtccccaggccatcgccgagacgaccgcgagagaggcggccggtccgccggcggggctgaggctccgtgcgatgtccttcaccgccatgccgtcctggatgccggcggagcccccggcccgcccgtaggccagcaccggcacgacgaccagcgcgatgaccatcagtgaaccctggaacacgtccgtccagcaaacggccaggaaccctcccatgaacgtgtacgcgatgatgacggcgccgccgatgacgaccgcgaccggatacgagacgccgaaggtggactcgaagagcttgcccgccgcaaccaggccgctggaggcgtagatcgtgaagaagatcaggatgacgatcgccgagacggtccgcagcaggccggtagggtcaccgaagcgcgcctcgaagaaacaaggcagcgtgatggaattggtcttctgagtatagagccgcagccgccgcgagaccagcagccagttcaagcctgtgccgatgaacaggccgaccgcgatccacgcgttcgtcaggccgccgacgtagattgccccgggcaggcccatcagcagccagccgctcatgtcgctggcctgggccgacaacgccgtgacccacgcacccatcccgcgcccgcccagcaggtactcctcgatgctctcgttgcgccggtagaagtagaacccgatcgccagcaggacgacgaagtaaacaacaaacgtgaccatcgtctcggtcgtcatcatatagtccaccatccgccgctcataccgcatgaccgcgcccacaacgcagccagcatcgcggcacaagggactccctctttatccgtccgagagccgcctctcttctcttgtcatgctgagcggagcgcagcgaagtcgaagcatctggccaaaggccatgcgcgcctcttgtcctcgggtagacccctcggcaggctcggggtgacacattgatcgttgccaagtacttcatttcattttctttcgcgtgagcaacttcttcacccatccgcacatgcgctccatgaaccctttctcatgggcgacgccggaccgccggccgtgaacagcaccgcgaatcgcgtcaccagcgcccccagcagtacatatccgagaatcacctgcaacatcagaagcacctgcccgcacgtgctgtccggattggcggcgatgtcaccgaaccccagcgtcgtcatcgtcacgaccgagaagtacagcgcgtgcacgaagccacgaatgtcaccggcctccccatcgaccgcaagacagcccggccacaaccggtagacaatcacaaagactgatgcgagaagcccgaaactgacaatgacgcgccacgtggacaaaccgtaatcagatgccagccagaacagtcgcaccggccatcgcaggcatcggtgttccttgtaccattgctcccaattcatccggcggatgttgtattccaggagttggcttgtgtctgggtagattcgcgttacagcaagagcgacaccctcaaacttcgtgttcctgttcacttcacagcggtagagcaaggttgtcccgtccacgacaaaccgggagaaatcggcatcttggaggcatgcataccgcaaatccgctccgccgaggaatgcagcgataagcttcgaatgctccagatgagaacaactcaaatcggcctgctcgaggtaagttccgtgaagcttgactccttcgagatgaaccttgccgctgaacccagaattcggaaaggcaccaagcatggcccctctcatgaagccgttctgtagtgtgatgttttccagaaggacatcctgttcggggtgctgtcttcgccagtcgttccactcggtcatgtcctgtctgtcggagcagcgtttgagcatgtcgtactgcccctggctgaagcggggttgccgctggttctctccctcgtctggccttgccatcgcatcatccctcaatacggcgtttcgggttcatagtcggtctggcctcggctgagattggctttgttcttgggcggtaaaccgcgtttttgggccaaaaacgcggaaattggctttgtttggcgcattgtggtccctccgatctgtcggacgatgcatccctcgggcctgcggccggtggtctggagcctggctcagattgggttcgatcgggttcgtttcctcggtcgaatcgctgttcttgggctgaaacggccgataattgggtttgttttgcacgttggggggccggtggaggggcgatcccggcccacagccacccgagacggtggtctcgattgcttggaactggtgtttggatggccatgagtgcgtccctggtgctgacggtcaccgatggactattgagttatgtggatatcatacaactggtggctttcggcgtcaacaaaaaaaaccggaatccgggccatattcttcagtccgcgacgattttttcgtcctgctctcgccaggcgggatcgacgatacagaggaagacgagatcatcatcgccggtgttttcgatgaactgggtggcattcggcgggatgtagacggcgcagccggcgccgacaacctgcgattcgttgccgataaacatccggccgcagccgccgatgacgtaatagacctccgaggaggccaggcgatgcggcctcgtcgcctctcccgcgccactctcgcgtgtgccaggctgtagcgaatctccgcttccatcttgtccggatgcaacaactcacgcagcagcgagccgtccccggcaacaaactcctcgcaatcgctcaacgaccgtacgagcattacgatcctcccaacagaatcgacccttccgtgaagaacgttccggcgacgcaggcggtcatcaggcaggccagcgttgcagcgatcaaggctcgaaccgcgaccggcccgatgttccgcgtctgctgcggcgccagggcgcagaggctgccgacgaagatcgccatcgacgcaatgtgggcgaatccgcacagggcgtacgtggcgatgaccgccgagcgagagtgctgcaagaggccgttcttcattgcggccgccagatcgttgtaggcggccacctcggtgacgatcaggcgttctccaacgattcgcgaaatctctcgaacgtccgccagcggcacgcccaggatcagcgttagggggtagaacaggtatccgaacagggcccggagcgaccactgtccctgccagccgaacgcggggttgatccatgctccgagcccgccgaggagcaggtccgccagcgccacgaggcccaggacggcgatcagcagggcggcgatgccgacgatcatgcgcactccggcgttggcgccgttgacgatcgcctcgaacagtccgctgtctttctcgtagtaaggctcgacgcgaacaccgagcgtctggggctgctcgctttccggcaggaggattttcgacatgaccaaggccgccggcgccgagagcagggacgccgagaccaggtgtccggcgatcatcggaaactgctcccgcaggctgaagacgtacaacgccagtacattggatgagaccgtggccattcccgcagtcaggatcgtgcaggtctccgaccgcgtcaggcgggcaagatgtggcttgacggtgagcatggactcgacgcccacgaagatgttgctggcggccaccagcgattcggcgccggagatccgcatcaggcgggtaaagacccgggcgaaggccttgatcaacagcggcatgacccgcaggtaataaaggatcgcgatcagcgcggagaagaagatgatcgtcggaaagccctggaacgccaggatgaagccgagcgaggtttcgccatcgtctccagtctggccgggtccgagggccaggcggccgaagacgaagcgtgcgccggcgccggccgagtcaatcacgcggacgaccccgtcgttgacgagcaggaagaccttcgctccggccggcaccaggaagatgaacgccgcgacggccagttgcagcacgacgccccaggcgatcagccgccggttcatgttgcgtcgctcggccgaaaagacccacgcgacgcccatcgggacgaagatacccgtgaagctgacgagattgtagatgtccatgacgacggattgtacagacaaccggggagcgttggaataccggactgatgggtagactggggtgtgccgaagcagtggagtgcggtacgcaccctactttgtcagctcgctgacgtctttgaggatgtggtgcggccggtaggcgtagcggtccaggtcggactccttggtgatcccgctgaggaccagaaccgtgtcgatgcccgactcgatgccggcgatgatgtccgtgtccatccggtcgccgatgatgaccgtctcgtcgcgttcgcactggagcagggtccgggcgtgtcgcatgatgagcggattgggcttgccgatgaaatacgcctgccgtccggtggccatctcgatcggcgcgatcagggcccggcacgccggagcgatccccttctcggtgggccctgtcacgtcaggattggtccccaccagccgcgcgccgcccagcaccagttggatggcggtctcgatcttctcgtagctgtagcttcgcgtctcgcccaccacgacataatccgggctgttctcatcgacggagagcccggcctcgtacagggcctggtagagtcccgagtcgccgatggcgaagacccgtccgccgggacattgcgaggcgataaaatgggccgtcgccatcccggaggtgatgaaatggtcttcgcccacctcgatgcccatgtgcagcagcttctggtgaagctctcggggcgagcgagcggaactgttggtcaggaagaggaaccgcttgccctcggccttgagccagtccacgaaggccttcgagccttccagcagacgcgaaccgtggtaaatgaccccgtccatgtcgcagacgaaaccgcgtttgcttctcaactgttccatcgattctccagaaaccaccaggagtgccccagccgacatatgcctgtctgagattaccggatcagtctggaggcgtcaaggcgggccttggaacggttgcgctcggtcgagggttgacagggccggatcgggtctctacgattggggtactgggcaggtcggttctacgggcagaaggtcggggtcgcagccatggcatcgctcattgtcacatcaggcaggcaggaaggggactactatccactcgggcatcggaccagcgtgatcggtcgggacgaagccctgctgattcagatcctggacaacatggtgtcccgcaaacacctgcaaatccgcttcgacgagaagacgggccgatactacgcctacgacatgaagagccgcaacggggtgtacatcaacaaccagcggatctccggcgagacacctctggtcgacggagacgtaatcctgatcggactgacgacgctgctgttcatcgacaaggacttcaaggacagagacagcgcgctgttgcactacaagaaggtgggcgagcggatgcgtgtcacggtgtacggcccgcagaagatcgacgaggtcgatcgcggccagggcgagaccggccatcccatccgctggtagttggggcccggcaggcagacgaatcaggacaaggaggtacggatggaccgacgggagatgctgggggctcttggatttggcgctgcggggctgctcggactggcgggccggcggcaggacgcctcggccgcagagtacgccagagcgacaaagggcttgcccccgctgaagatcaccgacgtccgggcgatcctcaccgcgccgcagggaattcgcctgtgcgtggtgaaggtcgagacgagcgaaccgggcctgtacggacttggctgtgccacgttcaaccagcggccgctgacggtcgtgacggcggtcgacgagtacctccgaccgttcgcaaagggacgtgacgctgagaacatcgaggacctttggcagaatgcctacaccagctcgtactggcggaacggcccggtgctcaacaatgcgctgagtgggctcgatcaggccctgtgggacatcaagggcaagcgggcgaacatgcccgtgtatcagttgctgggtggcaagtgccggttcgcggtcgattgctacacgcattgcggcgggggcacgctggcccagatcgaggagagcgtccgtcgggcgatggagcgggggttccgtcacatccgcatccagcgcggcggctacggctcgccgcatctgtcgaagcaggccgatttcaaggaggccggtttcggcgcgccggtcgattcgaacatggaggtccggccctacgtcaagggcacgctggagatgttcgaacatatccgcaagacgtgcggcgacgacgtcgagctgctgcacgacatccatgagcgcatccctccgatcgaggcgatcaatctggtcaagcggctggaagcgtatcggccgttcttcatcgaggacccgttcgcgccggaggacatcggctatttcagactgctgcgtcagcagacctgtgttcccatcgcgatgggcgaactgtacaacaacccacacgagtgggtcgggctgatgagcgagcggctgatcgacttcatccgcgtccacatctcgcagatcggcggtttcagcgtggcgcgcaaaatcgcggcgctgggcgagtggttcaacgtccgcagtgcctggcacgggcccggcgacgtctcgccggtcgggcacgccgccaacgcgcatctcgacctggcgatctggaacttcggaattcaggaagcggtcagcttcaacgacaagacgcgcgaggtttttcccggcgctcccacggtcgagaagggctacatgtacatcaacgatgctcccggatggggcgtggacatcgacgagaccctcgccgccaagttccccttgcccgagcatcccggctactgggaacccgtccgccgccccgacggcaccgccgtccgaccgtagttggccggcgttctctgcgtttacggcttggcgtatttgtcgcggttgcaggtgatcgtgccgtcgtggtattcgagctcggccgcttgcagcacggtgcggttggtgcggtagagcggatgatccggcgggtagtgcacgtggtaaaggataatgggtcggtcgccgagcaggatcacgccggggtggcctcccttggcatcgtccttgacacgtttgcccggatcgaagagcagaccgttgtcgaactgccaatcggtcaggccgtcctgcgagcgataggcccgtatgccgcgctgccccgcatccaccaccagccagtaggcgtcctgccacggccagacgaacggtgcttcgtggctgacgtcggtgaccgccggtcccacgaccgtccaatggtaaaggtcgtcgctttgggcgaggtaggaataggatccgtggacctcatccttgtagagcatgcaccaattgtcacccgcccgatagacgcaggcgtcgatgcaccggtccgaggacaggtcgagcgtggactgaaaggtccaggctctgccgtcagcgctggtgaagtgcttgatgaaccgcttgccgatccagtccttgtagatgccgtcgacccaggagacgtacatgtggtatagaccgttgtaatacaggatgccgggcgcccaccagctgcagttgttggcgatagggtcgccaaggccctgatcgccctgacacgtgccgaggtagcgccactgccgcccatccttcgacgccgcaatcccaatggccgagccgtggcagaactcgacgccctcgttcggttgaagggtcgcgcgccgctgggtgtagtagacccaccattcgcccgcctgctggttccagacgggagcgggatcggcggccccatcccagatcgggtcgctgaacagcggggctggggcattggccaggtcgaacattcgctcggttgcggcgtcgcacacgccgcacagtagagccgacagacaccaaccaacgagcactctgtttctcatgtgaaggtcctttcatcgatggtggcggcgccaggcagcccactgggcctccagaaagccccagccaatccctatgacggcgccgaccgcgtggcccacattcgcgacgctgccgagcaggcccgtcaggcacaggaagaaccagacgatcatcagcgtgacggtctgggggtgcagttcgagattggaggcgggatcgaatttgccctgcatccagatgtagccgagcagtccgtagaccacgcccgacatgccgccgaacgtcggtccgctgtagaggtattgcccgacattggacagcgcggaaacgaccagcaccagcgcgagcagccgccacgtgcccttgcgggtctcaaccatgctgccgaggtcccagagccacagcatgttgaagaagatgtgcagcaggtcgaagtggacgaatatgggagtgaacagccgccagacctgaccgtgccggacctcggacaggctggagtcccattgcacgtaatctccatccgcggagtagtgcgcgatggacaaatacgcaacgaggcggtcgttgtggcccagattggtcgccagcgtcacggccacactgacagcggccagcgtcatcgtcagaatcccgtagccgacgggaggtctgtagaaggcggttcggccttccacaaggcgcgcccgcctcggggcgctcgcctgcctgtcacggtgttgctgccgcgcgccctcgccggctccgaggacaaacatcgagtcatctggttgctggacgaaacgctcgaacagcgccgccgcctcttcgaggcgggattcgtcgaggacccagatgtcccagccgccgtcggaggccgggtcgacctgattctcgatccggcggctgtagaggaagtccccgaactgccttgcctgcgtctcgctttccagccggccgatctgtcgcattccgtgtccttgatcctgttgacatcgcaactgtgtgaacgattcacccgcgccgaccgctgtccgcccggtcccaggatggtatcgtctcgtctgccccgattccagccagaaccgaaggcggggactgcccgccgagtccagtctatttcggcagttctttgccgcagtgaggacagcatcgcggttgtttgcggcgttccatctcttcgacgaagccggccccgaggatgccggtgggaagggcgaacatgccgatcccgaggacggcgatgatcgcggccatgagtcgaccgatgacggttacgggaaggacatcgccgtagccgacggtggtcagcgtagtgacggcccaccacatggccatagggatgctcgagaagtggtcgggctgcgtctcgttctccgcgtaatacatcaggcacgaagaaatgaccagcaggatcagcaggatgaacacggtgctgatgagctgttccttcttggtcgcgacgacgcggccgagggtctgtagcgaatccgagtagcgtccgagcttcgccagccgcgcgatccgcatgatgcgcaggattctcagcatccgcagatcgatgttgacgaacggaagatagaagggcaggaccgccaacaggtcgaccaacgccagcggactgcgcgcgaaccgaagccgcccgaataccggatgagcataccgtggctcctcgacgcacgaccagatccggagcaggtactccaacgagaagacgatcacagagacgtactcgaacgccgtgaaagcgccatccatcgcttcgcggatcgaggcgacagactcgaagaccattgccgcgacgttcagcaggatcaacacgacgatcgcgacatcgaacacccggctgacggtgtcgcccggccgggcgaccgccacgatctcctgcacgcgtctgcgaacactcctgtacgaccaggctgccatatcgggcggatcatacctttgccttcgatacttcgtcaatacgatcagtgtcgtgctggaccgaatgggcctggtcgggtaacgtggatcagctcagatccgaagagcagaaaggcaagaggcatgaaggcgatgacccgacgcgatttcgtcaaggccgccggtctggcgggcgtggcagcacggacgtctccattcgcatgtgcccggacgatgggattggccgcgagcaggccgaacatcatcctggttatgaccgacgaccagggctatggcgagctggcctgccacggaaacccgatcatccaaacgcccaacctggaccgactgcacgcccagagcgttcgattcaccgatttccaggtcagcccgagaaacgcggcttcgacgaggtcttcatccacgggtccggcgggatcggccagacctaccccggcagttgcggtgacgctccgggcaacacgtacttcgacccggcgatcctgcacaacggcacgttcgtcaagaccgggggcttctgcgccgacgtctttttgagcgcgcgttcgactggatccgtcggcagtcgcaggcgctcgagcccttcttcgcctacattgtggaacgctccacacagtccctacgtttgtccggagtcataccagaagccatatctcgatgtgggtctggctgcggcctatgcggcgtattatggaatgatcaccaacattgacgataacttcggtcgcctgcttgccagactcgacgagtggaggctcagcgagcgaacgctgctgatcttcatgaccgacaacggccacgcgcggggcaatctctacaacgccggcatgcgatcgatgaagggcagtccgttcaaggaacgctactggcggcagttcggcggtggccccgacgagacgctcctcaaacaaatggacccgatgcgcacgatctgaacagcgcacgaggaccccgcgtccttgttgtcaaagacgacctttcccttgccgaggaccggtggtcgttgatttcggccggggcattccttatagtgggtccgctgccggcaaacgcaattcctgggaattggccatggaaaaggaaggcaaactgaaggaagccgtgctgtgggaacctgtcgaggacaggaaggttcgctgccatctctgcgcatttcggtgcctgatcggcgacggccggttggggcactgctgtgtacggcggaatgtgggcggcacgctgtattccctgaactacgacaaggtctgtgcggccaatcccgacccgatcgagaagaagcctctgttccatttccagccgggctcgaggagctattccatcgccacgatggggtgcaacttccagtgcgagttctgtcagaactggcagatcagccaggcggcgctcggaggcggcgaaattgacggccagcccctgaccgcccagcagatcgtcgccggggcactccgcagcggttgcaggagcattgcctacacatacaccgagccgaccgtgttcatggaactgtgcgccgattgcggccggctcgccaaggaaaagggtctggcgaacgtcttcgtcagcaatggctatatgacgcgcgaggcaatcgacttcgcgcgggattggctcgatgcgatcaacgtcgatctaaaggccttcagcgacgattactatcgccggctgtgcaaggcccggttgcagccggtgctggacacgatcgcctatatcgcgcgggacaccgatatttggattgaggttacgaccctgctgatcccgggcgcgaacgactcggaggaggaactgaagcagctggcggatttcctggttcgccaggcgggcccggatgtcccctggcacatcagccggttctacccccagtacaagtacaccgaggcgaacgtcacaccgatggaaagccttcagcgggcggagcgcatcggcaaagacgcggggcttcgctatgtttacctgggcaacgttccgggaacgcgttcggagagcaccttctgctacaggtgcggacgcctgctgatcgaacgcatgggctatcggatcgtggccaatgagattcaggattccaggtgtccgcagtgcggcacggagatagcaggttttgagctttgaggtttcatgaagatcgttgcagatgggaatatccctttcgttcgagagtgtttttcgtcggtgggtgacgtagaggtcctggggggccgtgacatgacgccggagacggttgcggacgccgatgcgttgctcgtgcggagcattacgcaggtcaacgagcgacttctctccggcagttcggtcaagttcgtcgccaccgcgacgatcggcttcgatcacgtcgatctcggctaccttgatgcgcacaacatcggctttgcctcggcgccgggctccaatgccaattccgctgccgagtacatcgtcgcggcgttgctcgagatcgcccgccggcacgcgatccggctcgatggccggtccatcggcgtcatcggcgtcggcaacgtcggcgggcgcgtcgccgccaagtgcgaggccctgggcatgcatgtgcggcgcaacgatccgcccctccagcgacgaaccggcgatccgaagtatgttcccatcgaggcgatcagcgactgcgatttcgtcacgttgcacacgcccctgacgcgggagggtcccgataagacctaccatctggccgacggcaggttcttctcccggctcaagcagggggcggtcttcctgaacgcctcacgcggcgcggtggtggattcacaggccctggcgacggcgatcgactcgcagcgtctgacggcggtcgccttggacgtctgggagaacgagccgaatatcgacgtgcgcctgcttgaaaaggtggatctgggctcgccacacatcgccgggtattccctggacgggaagatcgccggtctgatcatgatctatcaggctctttgcgagcacttcggcctcccgacgagattcgatgcgggcgatttcctgccggctcccgaggtccccacgatcgagctgcctggcgatgtcaccgacgaccaggcggccattgcgcttgctgtggagaaggtctacagcatcgtgcgggacgacgccaacctccgccagatcgccaacgaaccacccgaggcccgaggacggtttttcgatgccctgcgcaagaactacccggtgcgccgcgagttccacaacaccacggtcgttgtgccggagccggccggcgtgctgattcgcaagctgctggggatcggttttaaggtgaaagggcggcggcgtgaaggcgacgactgacggtctgcttcggtggccgggcggctctttggatttctccggtggctgtttgatcatgggcgtgctcaatgtcacccccgattcgttcagcgacggcggacagtttctggatgccgagagggcggttgcgcatggcctggagatggcctcccaaggagcggctatcatcgacgtcggtggcgaatcgacccggccgggcgccgcgtcggtgccgtcggccgagcagattcgtcgcgtaatcccggtgattgaatctctggtgcgtcagaccaaggtcccgatcagcatcgatacctgcgatgtggaagtggcgcgggcgtccctggcggccggagccaccattctcaacgatatcacggccctcgcggatgacaatatggcccggctggcggacgagtcgcaggtccttgtggtgctgatgcatatgcagggaacccccagaacgatgcagaccaacccgcagtacgaagaggtggtgggggaggtcctggatttcctggtcggtcgggcgaggcgggccgaggcgttcggcatcccgagcgagcggatctggatcgatccgggaatcggattcggcaagactctggagcacaacctgctcttgctcaagcagattggacgttttgtggcgacgggctaccgtgtgctggtgggtccgagccgcaagcgattcatcgggacaatcacgggtcgggagaagcccgccgatcgtgttttgggcacagcggcgacggtggccctttgtgccgcggcaggggtgtcaatcgttcgagtacacgatgttgcggcgatgcaggacgtgctcagggtcgtgcgagcggttcaggaatgcggagcggcaggctccaagcagggggcgatcaaacacgcagggtgaaagcatgcgcggggaagccggtcttcagacaggttgatcgtggacagagcaagcaaacctcagcacagggcgatatagctggcaatggccagaatgaggatgcgtctcttgctgatgatgaacggaagccaagtttcgtaataaaacctgctcatggttcgtttctgccccccaagaatccatcaatctcaacgaccgtattatagccgaaaccggggtaccagggcaagaaaaaaaggccgagatcgttcttaagtctttagagaaaatggttttgcgttctatcctttctccgcaacggttacgatgcgtagatgtgctgaaccgtctcgaaacgtcccatatcacgccgagcgggagactgccgatatgatccgaaaactcgcccccaggctgttcgcagggcagaccccggcagtccccagaaccgtgtgtagacggctgtcgtatattttgtttgacccgatgctgccatgcgattagagtggcaactatggcgttgtcgcctcccctaggtacgcgaagtaccgaaactgctgcggagggcaaagaatgactcaagaaccaacgttaggatgctatgccctatttcacacataggagcacgcagcaacgcacttaggagatgaccatgattgattcgacggaaaacgtcttggcttggatgcccggccagtgggagtggctggtcattctcgtcgttgcacttctgatcttcggcaggcgcctgccggaaatcgcacgcagcgtcggaaagagtctcaccgagttcaagaagggcatcaacgaagcgaaggagtcctccgacgatctggtcgatgacgtccgcaaggtcaaagacgatgttgtgaaggacgccaagaacgcttcgggcctgaacgacgccgacctgaaaagctgaccgccgcccgaccgggccccctcctgctctcgaccgagatgggcgctgccatgaagaaccaggatcccctaagctgcacaatgagtttaggcgatcacctcgaagagctccgcgcgcggctgatcctggcccttctcggcctggtgatcggctcggttattgccctgatcttcggcacgcatatcctgcggttcatcgagaggccctattatgacgccatgcgtggtcggctcaaggaaacggaagtgcctcgggtgcagtcggaaagcctcgccttgcttgatcagttcttcgcgacgctgacggagcgcctggcgtcggacccgaatgcgcccccgatcgatccgaaccgcgttgctttcatccgggacgtctctgtgaaggctgtcaaggcctggacggagcagaagtgcagcgccgccgagggcaaagcgcttccgctggatgcgcgcctccgggtcttggggatcccggaagccttcacggcctacatgaagatcgcattcatttcggggctgatcctgacctgcccatgggtgttctaccagctctggatgtttgtcgcggcggggctctatgaacacgagcggcggtacgtgcgccaggcggtgcctttctccgccgcgctgttcatcatcggagcgttgttcttcctgtttgttgtcgcgccgctgacgctgcgattcttcctggcgttcaacgatatcgtcggggtggcggccaactggaccctggagaagtacatttcctttgtgacgattctgatgcttgtcttcgggctggcttttcagacgcccattgcaatcttcatcctggtgcgtacgggcctggtcgcgctgaagactcttcgcgaggtgcgcaagtacgtcattctggtgacagtcatcgttgcggcggtggtcactcctccggacgtgatttcccagatcgcgctggccattccgctgtacgctctctacgaattgggcattgtgctgtcatacgtctcgcttcggaaggccgaaaagaagaaggacgccggcgccgcaccgccacaccgcgattagtcctcacgccagtggattcccaccgaaacgctgaccttgtcgattgggcatgagtacgccacctcgcgcccgtcaacagaaccgattccgaatcggcactgtatcttgtccggcagcgttggccggagatgtccgacagagaaacctccgatcgccggcagcgagtcgacagaatcgtgtcggattgcccgcagaccacgggctcgtttttctgcttcttttcctgtaacaaagtgcgttcgattgcgtcttataccatagacgcccacggcgaggtgtgggatgtgacacgcgtgtagtctcagacgagattccattgacacggggaagccagcgggagtacgaccatgtacaggcggagaatctgcgcatccatcgggacggtcctggcgttggcggcaggcgcctttgcgcaaatccaggtaaacggctacggcttacaacaccagacgcatccggcggtggccatgaacgacaacggccagtttgtggtggtttggcgcagtcacgcctccgacggccgaggagggggggtattcggtcggcggttcggcgccgacggggacgccctggacgacgagttcaggataaacctctccgaggtggacgtggacaactggacgccggcggtggcgatggccccttcgggtgagttcgtcgtcgcatgggtcgcggcacgggaaggcgaccgcaacgtggtgctgcgccgattcgatgccgagggagaggccctgacggaggaggtggcggtggcggatgctgcggatgtcgctgaatccgacccccagatcgcgatgaattcggcagggaccttcgtcgttgtttggaccaactggtacggggattcgtacaccggcaggagctatgcgacggtccgtctttacggacccgacgggttacctctggtcgaaccgtttagggtcagcgacgagccacagcagaaatggcctgatgtggcgattgacgaggcgggacgattcgttgtcacctggattcggatgggcgacacgtacaatcgcccctacggcgagtacatccggattcgccggttcgacgcggatgggacaccgttgggaccggagaagtcgttgacagacgacctgaacagccggtggtacggtccagcggtcgccaccggccgcgatggcgggttcgttgtgacctgggctatcggtcccttcccctacgacatctgcgcgcagccgttcgacgcggacgccgaaccggtgacgccgccttatctcgtcaacacctgcgtcgaaggcaaccagggacgtccctgcgtcgtgtcggacgggagcgaccggtttctgattctctgggactgccatgatccaagcggcaacggctgcactatacgcagccagctctgcaccggcgcgggcgaactggtgaatggcgaatcgactctgaaggttgaggacgcctctcgcaactggtatcccgatgcggcgatggcggctgacggtcgctacgtggtggtctggatcgcagagactgccgacggcgaaggctacgacgtctttgctcaggtgggggccctgcgatgatagagcaggatccgctcggcggcgcagacgtcggtcagttatggcaggcgagttgcttctgggacgctcgcgacaggtcgttgagcaggtacttgcggaccaccacgtcccagctcatgttataggccagacggtagccctcgcggatcatcgcgtcgagttcggcttcattccggggcaagcgctccaatatctccctcgcgagccgggccccttcggtggcttcaatgcgatcgcgcacctgccggttgatctggagcaggtcttcgatgtcatgatacgggtggttgcccaaggcggtgtagtcggccaggaggacatttctgacgggttgtccgccggttacgtcgcggacgaagccggcacagccgcagacgcctgtgagcacgcagagactgccgtaggtgagcggttcgagctgggcgatgccgaagggctcgtagatgctctggccgaactcgacgtcgctgccttttcggatgtcgaggaactccatgtcggccggcatgcggctgccgcaggatctgggatcgaagccgaattggttgatgaagatcgccttgacgtttctgctgcgggcattgaactgctggatcgccgtatgaaagtcggcttccccgccggacaggtccggccagccttcacgatgggcgacgggccacccgtaggttgattccatgcggtggatgtcacaactgcgccgtcgtgacacgtccgtgcccagcaggagatagacggctgtctgcccctgctgcctcagcgctgcatccatctcggacagcacgcgcaggtcgcgccagagccccttgctgcggaccagacgtgtcacgtgcgtgaaaacgtagtccggccggtaccccagaaggttctcgcagtaccgctggagcttgtctttggaggccagcttctcgcccacgcggatctcgtgggcgggaatgccgttgtagacgatgtcgatgtcggctgtctcgaactccggtgccaggaaacgcagttcgtcggccacgtagtccccgaccgcgtagatatggtcgcagtacttcgaggcctcgaccagcgagtgcttgaaatacgtggcctgattgccgaagacatcgctgacgtaaagccggtcacgatgggcgcgctccatgacgttgtagaacatcgtgtcgtgaccgggatgctcttccacgatgcggcgcatcgtggcgacctcgtgggcgtagaacaccgttcggaagttacagtacggctccagacgggccgcaagcacggtcggcattcccatgaactcatgcgagatgatggtggtccggccgtctgcggctcccagcgctttgagcaccgcgatggccggcagcgccagacgcacgtactgctcatactcccatagatgctcgtgcagatgactctggatgccgaattcctcgaagagacgtcgcttgaattcgttgagcatgccgcgatccatgtaccgcacgtcgatcaacaatacctcgggggtgctccgaaccccggtttgcttgtcgataaaggtgcgacgtccgtatacgatacccacgttgtaaagactctcaatccgaccgaaggcatggctgtagctggggtggatcaggccgtcgatcgaggagtacagcacctctccgtcctcccccaaccggtcctggaccgagccgtccgtggtaaacagcgggctgatgagcatggaacgaccgatggcgttcagataggaaggacaggtgaaaaagccctgcaggacggcgccgattccgccgatctttcccacggcttcgtgcgtgacatgcaccgcgatgctctcttcggccacgtgaggtctccccaagcgttagcgtacgtcgatccgagtgtacgaatccacatttaaaatgtacgccacggtcggggacgtgccaaacggcaccgtccgtgcgaggcaggcaggaacagggcccggaaaaaggcgaggggttctccggtcggcagacctcttttccggacgtatgagagggtcccagggtagcctaactgaggcgggtccgcaggttgcgaatcaagccggagaggacctgtggcgggatcccctgaaggcccgggtcggggggatcgctggtggacatctgatccaggatttccttggccttgcgacggttgctggcgatggtctcggcggtccgctgcgcgctgtccaggtcgccgtcggccatctgacgcagatagcggacgatagcttccgtcatcttctcgctggtgacgttctgcgtcggctgggcatgtatggcggcgtcgggaatctccttttcctggagaatgctctgggtgagctggaacgtctcggccagaagccgccgcttacgctcctcttccgtctcatcgatcggcgccagcttcagctcctcctcgtcgctttccaactgggggacgtagaccttgttgtggcaggcgggacacttgccccacttgccgccggcggtgtccggggcatcgatcttctttccgcagtgctcgcagtggaatttgatggacatgttcagacctcacacgaagcgattaaccctgcgcgcggtactcggccacgacatcggtggtgatgccgccccgcggcgtgaagcgggccgtcaccttcatccatcgcggtttgcacgcgccgctcagatcgtccaggatgtcgtttgtcaaagactcgtagaagatgccacggttccggtagccctgcaagtagaacttgagactcttcaattcgatgcagtaccggtcagggcagtattccacgacgatctccccgaagtccggctggcccgtctttgggcagacgctggtaaactccgggcagcgaatggtaatccggtactcgcgtccgggacgcggattgtcgaacatctcgattgtgccgggttcacccatgtcctgatccttgtcgcatgtctgccagtcagtatagcgcatcggtgcgaatgtgacaagcgggaatcggcccggatacgggaaaacggcctctcgacggcacgcgcggcaccctttgacagggccggtccgacgcgataccatgaccggtcgattgatcggagcaagacgtctgagtcgtgttctcaggagtgcaggtcgtgggaaaggacaaggctgttgtactgttgagcgggggattggattcggccacgacgctggcgatcgcccggcacgaggggtacgcctgctacgccctgacgttcctgtacggacagcgtcaccgacgagagaccgaggcggccaggaaggtctgcggcttgctcggagtcgttgagcatcgcatcgtgagaatcgacctggcggcctttggcggctcggctctgaccgacagcggcattgaggtgcccaaggatcgaggctctcttggggaagccacggacatccccgtgacatatgtgccggcgagaaacacgatcttcctcagctacgctctggcctgggcggaagtgctcggcgcgttcgacctgttcatcggagtcaactcgaccgattacagcggatatcccgactgccgggccgcgttcgtggccgcctacgaagcgatggccaacctggccaccgccgcagcggttgaaggaaagggccggtaccgaattcatacgcccatcatcgagatgaccaaggcccagatcatccgcacgggaatgcggctgggtgtggattacgccctgacgcatagttgctacgatccggacgcccaggggcgaagctgtggtcgatgcgacgcctgccggctgcggctgaaaggcttcgccgaggcggggctgagcgatccggccgtttacgtttctcctgaccggcaacagagtctctgatgcgcgtgaccgagacattccattcgttgcagggcgaagggatcctctgcgggacgccgagtgtgttcatccggctggccggctgtcccttgcgatgtcgctggtgcgatacaaagtatgcgtgggacttctcaaccggccaggagtgtgctccgaccgatctggtcgagacgatccggcggcattcctgcggccacgtggtgatcacaggaggtgagccgatggtcggcgctgacctcgccgccagggaaggactggcggagttgacgcagcgcctgcgaagcgaggggatgcatgtgaccatcgagacggcgggggggctgttcgtgcccgacctggcatgtgacttgatgagcatcagccccaagatggccaattcggtgccgtcgcagttggctgacgccgcgtctcatgaaagccagcgactggacgttgaagccctgaccgctctaatccaggcgtatcccagccaactcaaattcgtggtcgagaccgccgacgatgtccgggaggctcgcttgctggtggatcggctgccgtccgttccgtcggatcgtattctgctgatgcctcaggctcgaaccaggcaggagtttctggcaagggccccggcgattgccgcttggtgtgtggagacggggtatcgcttcggacaccgcctgcaggtgctgctgtggagtgaccgtcgcggcgtatagcgcgttgctgacgtggaccgtagcccctttttcccattctgcgcgaatcgcagttgacaagcgatcggccgtcgatgataatccggtttgtgttgcccgggtggcggaatttggcagacgcgccagcttgaggggctggtgggcttcggctcgtgctggttcgaatccagtcccgggcacttcctcctggaagtgttccctgtgagcaagatcagaccggatgtgttccggatgaggatgcggctttactcgaccgcgaactccttcttgcgggtgttcatctgggccttgagcctggcaacgatcgacgagtgcatctgcgagacacgagactcggacaggtccagcgtcgcaccgatctccttcatcgtcatctcttcgtagtaatacaggacgatgatgagtctttcggcacgagtcagtcccttcgtcaggaggttcttcaggtcgcgcttctgcgcttcgagcagagggtcttcgctgcggttgtccttgatgacgtcgatttcgtagacgtccttctccccgtccccgtcgccgcacttcgtgctcagggatacgagactggcggcattggcatcccgctggagacgaatgaactcatccatgtccatgttcagctcctctgccaactcgttctcgtcgggtttccgccccaggtgcatctccagcgtgtgcgtggcccgagccaattgatgggccctggcgcgcaccaggcgaggcacccagtccatgctgcgcaactcgtcgagaatcgatcccttgatgcgcggggcgcaataggtctcgaattttacgccccgggcgggatcgtaggcgtcgatggcgtccatcaggccgaagatgccggcgctgatgagatcatcgagctcgactttgtccgggagtttgctgtggagccgctcggcggcgtatttgaccagatctcggtaatgctccatgaggaggttgcgatagcaatcctgacgagtctcgtggaacagctcccacaccttgtcgatgtcgagcttcttctcgggcttcgtcgctgagtgtgtcttcacaggttgtctccgttacatgtcgcagccgcaatccgttttcgtcgtgctcacaagcctgtgggccgacatcgggtccggacggtccgccggctccgacaacgcccacactcacacctgtcattatcggccttggaggccgggactttaggtcagccactgaaagactctccggaaaaacgtcccgccatcggctcggcggcaatcgatgcccccgaggcgagccgccagcatgttgaacgagcaggcgatttgggacttcggataggccagtacgacgggctgacgggaccgtacggccgcacacagacgttcgtctttgagaaggaccccggcgtaatagaggtcggccttgaggaaccgggccgccacgtcggccagacgctggtaaatctgtcggccttcggcgatactctgggccatattgaccaccacacttatcggaccgtcgaaatgttttcggaccaggaccttgatcatgccgtaggcgtccgtcatggcggtcacctccggtgtggtcaccaccagcacgtgatcggccgccaggcagaaactgacgacggaattcgagattcccgcggcggtgtcgatcacgatcgtatcactggtatgttgcagtccggacagatgctgaagcaggcggcgctgttccgactcgctgatatcggcgagctggtccagacccgatgcgccgcagatgatctgcagaccttgggggccggcctggatgatgtcttccacgcgtttggatccgttgatcacatgggagatgttgtacttgctgcgaatgttcagcaggaggtccagattgcccagcgagatgtccgcatccagaagaaggacgcgcttctcggaggcggccatgcagagagcaaggttggtggcgatgtttgtcttgccgacgccgccctttccgctggtgaccgcgaggacacgggccaccggccgatcactgaccggcgtctgctgcagattgacggcttgattcgccatgattgcgggcattgccttcgagtcaatcggtggtttcacggggcgtcgaggagtcttcgagagggctgtcgggagccacgatctccacgatgggcagtcctgtcgggctccaaggggtgccacacttgagggccagcagttctctggcgatcttccgattcagggagttttccagaagcttgccgacctggagctcaatgtactcgtcgcggttctgttcgagcagcgctttggcgtgcagatccggctgcggacgaatctccatggtgctgttcgggccgaatcggatgttctccgtatcacagaacagcagacgctgattctgaaggtgctcggcaatcgcgccgttgagggcatgcacgaattccagcacgggcatatcctgtggtacgaatcccggcgtccgcgtattgtgcatgttctggtacaaaacggcacgacgaagctccgtgaagcggagaatcttcaggagcaactccgtcaggttgtcggggatgggaaactgcatatccatgagcactccttcgggaaggcggtctcaggcggtccgcaccgcgtggtgttgtaaagaagaggtgcactgggatggacaagtctggtgagggtcgacctcgtctggcgccgattggggggtactcacggagataaacccgtgtgcacggagcggacgcacacggaatggtattactcgcactgaagccggatgtctcatccttgatcctttcggtcttccttggacctccatgaagcggcgaacctccatggggtgttgacacgtgcttggaacgcggcgatctatgacaagcccctatgttgcttcgggcgacataaagtttcctcccgaggacgaggcattgcccggcggggcggcctcaatctgcccggaccggtgactgtcgtcgaagtgtatcgctctctgcgtccgctcctcttcgttcagcgtgcgacggatctcgctgagactcatgttctccctcagttccatgattcgcgaaagacggtcgaataccgattcatcgtagaggcggtgtccgccttcggtccattccgcttcgcgaatcagccccatgatggtgtagttgtgaatcgtctgtcgggagaagggactggatcggaccacttcgccgatccgatagcgtttggcgggaatctgcagccttcgactcactttctgccaactcatggttgcgatccgggattgaactgatgccggcacgggagccggagcgattcgacaaagtccgacaatggcgaggcgaccgcccatcgtgcggcagggatgatacaggtatcttgttcagcacaactacgcatgacaccacacccgaaagaaacaagagcattacgaaccgggcaaaccatccttccgaggtggcctcccgctccggagcatcgtcagatataccagccacggtatcgcgccacctgccgccacagacgacttcacgcctgacaacctgcccatgtcacagccgaacgccttgcgcccgtctgtggcgaccacagagaacgcattttacattttgcaaaatgtaaaagtcccttatcggcctgtcaactggttttgggatttttcaggaaaaatcttcggatggctcgatcccggcgtgatgggcctttgcggataccgggcccgctgccatcctaaggccctataacatgaggaaatgcggactcttagactgcgacgacgggctccgtttcacctccgaagcctgccacgagccctttcatagttttctgcaaacaggccgtggagaattggacgataagaggcggtgtaagtccaaagccataatctctactgaatcggggtgctattgtctgcccatgaccgaacgaatcgaccaatcgaacgaccacaaagacgatccctcggctcaccactcgctgctggagcgggtcacaccgctggcgcgacagatcaacagcctggacatggaccggatcgccaatgtctgtgtcacgaagatccccgcgatcgtcggatcgacctttgcgtctttgtatatcctggatgagtcgaaccatattctgcatctggtccgctgcaaccatccgtttcccatcaacaagatcgtgtccctcaatcagacgccaccgtcccccatggtcgtggcggtcaagagcaaggaactgatcctgaccggtgacatcgacacgtacaacagaccgatcatcaagcggtcgcaacgggcctttgcggagaactacacgacgaccaactgcgcgatcgtgcctttgatctgtcacgacggcgtcgtcggcgtcctgaatctggcggacaaagcaccacctgtcgccttcacgcgggaagacatcgcgttgatcgagttgctggggcagttgatcggcgcttcgatcggcaacatcaagctgttcgagaagatgcagcgacaagccatgttggacggtctgacgggcttgatgaaccaccggaccttctatgaggctctggaacgggagctgtggcgttcgcgccgctacggcggtacaatctcgatgatcatggcggacatcgacaatctcaaagctatcaacgatacctacggccaccgtgcaggcgacaaggtcatacgcgaaatcagccgcaggatcaaggagtgcatccgccagattgatctggcagcccgatatgggggcgacgagtttggggtcatcctgccgaatacgtcgctggaagaggccaccctggtctcacagcgcatcgtcgatgccgtcgcttcctcttgtgtgttctggcaaagtgttcgcatcccgctatcgatcagcgttggtgtcggccagtatgacgccgacgccaatccggaggatatcaccagtcgatccgaccgagctctctacagagccaagcaatcgggcaagaacaccgtctgggtgttcggatctggcgagaaggagtgattgtctggggtgtcggcgcgcgattgcctccgtcagcacgggtcccggagccagccaagcggccggctccggcggcgggtgtactcgatagtggtccgccgccgggccggatgcgattctgacggttgccgaccggtaccggcccttgtcatgcatgccagaaggctacggcgcccaacagttgggataactccccgcgccgcaactgtagtgatagtaggacacgcagccgcagttattccagtgccatgaccagtaccagttcaggttaagacacggattggggcagggattcggacacgggttcgggcatgggtccggacacgggttcggacatggattcaggttcggacatggattcaggttcggacatggattcaggttcggacatggattcgggttcggacatggattcgggttcggacatggattcggctgtgggcacggacacgggtcaggattagggcacgggtttggacacaggtcccagttcgaccagtggcagacgctcatgtaggagctcgagtaatacatgccgacatgatatccccacgccggcgtgctggatgccagaacgagcaggagcaacagggcatacttcttcataggaaacctccttgtgacaatacggtgttcctggccgcgcgaatctctccgtagaccggcgcgggtgagtgcgattcctgcgcactcgatcagtccgatcggaacgcaagctccgaacgggagacatttcgtgcatgtggtggcggttcatggatcgccagcgccgaccagtcgccgaacagcatgcccgtcccgacaacgatacgccgccggcctgatcgagcgaaggaagaatggtggccagtccacaccatgacagtccaacggattgggtcgcggcccgagcaggttaccagagacgccgctcagacggcggatcccagccgtgggctatgcgacgggcccacggctgggccgaatctgcatgccatgctctcgccaatgcccatatcccttgcgtaaagcgtctcgacgatcacctcggtgtgtaggtgacaatgccccataccgggccgccatagacgtggtggtcgccgaaacttccaaagcaactccaatcgatgcagccgacttggccttgcctggaccaggccccttggtagctgtcgacacccatgacgcggaccggggtcatcgggctgctgtagagcaggccggcctgacccgcgaagttgccgatgacgacggcccctggactgggacagggcgtcggacacggactgggggacgggcagcacagcggtgtgccgttggcactgccgctccagtttccaatgccaaatccccacgcactggtgctcatcgcgagcaccgccagtaccaatacgcacttcttcatcctttacctccttgtaaactgactttccttttcatcagagcacgaccctctccggaaggtcgctccgtccggacgcacctgaaccatccatgcgggtgcgcatagaatgcgattcgttcctgactacccttttgcgtggagacaaaacgcgtacgaaaacaggagtggtggagaaatgtggcccattcagcatccctgcctccgtgcccacgtatcgactccaaccgatactggtcctgtttctacaccggcggcgggcggttgtcaagagaaatctggatgttctatgcgacaattcgcttgtatagggcggcacgtgcaggccggcggtctttatgtggctttccgatcggtgtggattgtgataatctgggcgaggtccaatctctcgtgccgcagttgacaggacggcgcaaggccagtctgcatggggcatgcgagtagggggatggcagaggaactacacatcgcagacgcggcgatgaggcggttcggctgccggcggagaacaaggaactgggaatggaatgaacgataacacgatccatgaggattgcacacgaggtggtcagaaccgtcctgacttgcggcagacggcccatcggccccggcggcttctggtgttcggggggatcgctctgctactcggtctggcaggcctgagagtgcttcgtcaattggcttacgcacccccgtccgtcgacggtacctacgagtggaccctccgttttccgggtccctcgccgggagccacgttcaagaccgctccgggtgacgatgtccgcaagatgcttgacaccctgctggtcgatgccggggcggattgggccggcgctctggagcagaccgggacggtgcggatcgagttgtcccacctcagcgcgactccgcttggcgttcgcctgctgtggcgattctggggaccgaaaggatcgcccccgcccgaccggatcgggcgttcgctgctgacgatggaggtgcggcaaacgtcaaaggcacccctccgatatgagttggtgcaccttggcacgggcggaaccgagacggtgaccggtgcattcgacggctacccgcatgttgaggatgcgatcctcgacgatctggccagagtgatggagtccattcaggcgggtcatgcggcggggtgaaccgggccgtcgtcacaagacgatgcctgcgagtgtacggccacgcatgtttcttcagaaaggagtgatccatgagagatgccggggatgtgaaggccagccgtgcggcggtcgcggttctgctggtggcgatgctcatgtccgcgagcgctgcttcgcagcgtctgcgcgttgccgaaggggggcgctacatcgagtacgacgacggccggccgttcttctatcttggcgataccgcgtgggagttgttccatcgtctcaaccgggaagaggcggatcgctacctggccaaccgcgccgccaagggcttcacagtcattcaggcggtagtcgtcgcccagttgggtggtctgacggacccgaatccgtatggcgatctgccgctggtggagaaagacccgacacggcccaacgaggcctacttcgagcacgtcgactacatcgtcaacaaggcgaacgaggcgggtctggtcgtcgggatgctgccgacgtggggcagctattggaaagtgggatcgggcatcttcaacgccgagaacgcgaaggtctatggacgcttcctcgggcggcgatacaaagacaagtcgatcatctggattctcggtggcgacgagaacattcgcaacgacaccgagcgagccaccgtcgaggcgatggcgctgggccttcgcgagggggacgggggagcccatctgatcacgtaccacccgcgcgggccgggtctgtcttcggactacttccaccgagccgactggctggacttcaacatgttccaatcgtcccacgcggcacgggaccacgacaacggcctgttcacggatcacgattacctgctggagccggtcaagcccaccctcgacggtgagcctcgatacgagatgctatcggtgggattctacaacgccaatgaggcgcgcaacgttcgtttcgatgcatacgatgtgcggcaggcggcctattggtcactgctggccggcgcgtgcgggcacacgtacggacacagcagtatctggcagatgtggcagcccggacgcgcgcccgtcctctgggccaacgtcccatggttcgaatcactggaccatcccggtgcctttcagatgggcctgattcgcaagctgttcgaatcgcgtccgttccgcaagctccggccggcgccgtcgatcctcgtcaatgctccggatacgggaggcgccaaggtccgcgcggcactcgcctgcgacgggtcattcgccttcatctattcgccacggggcgagccgttcatggtgcacctgagcgccatccgcgccacccgtgtgaaggcgacgtggttcgatccccgctatgggatcgccgagccgttgcacaccagcgacaacgtgggctttcagacgttcgtgccgccgacttccggacgcggctgcgattgggtcctggttctcgacgacgaagccgcgaaggtcccgccgccgggccggccggagtgaggaacgatgcctgcgatggactatgagcgggtcgcccgcttctacgacagctacgtccagacggacatggatgtcccatttttcctgcgggaagcgaagagggccggcggtgcagtcctggagttgacggctggcaccggacgtgtctcgattcccttgctgttggccgggaccgacctgacgtgtgtggaggactacgatcccgtgtccaaatcggtgagcggcagccagttctacgacgttcggtgctgggatggctctcttccggccgccatgactgtggacctccattcctgtctgcactcgcactacgacttccaatcgctggcggaagcagcgggtttcgtcccggtccatctatacggggactactctatggtcccttcgagccccagacgagtcccttcatggtctgggtcctgcgcaaggcacgagcggagacggtttgatatggccgagcagcgatatccggaaccgacggtcggggcgttgatcttcaacgcccagcgccagctctttctgatgcgctcgcacaagtggcggggcaagtgggtcgttcccggcgggcacatcgagctgggcgagacaatggaacaggccctgcgccgcgagatccgcgaggagaccaacctggagattcgcgacatcgagttcgtctgcttccaggagttcattcacgatgaccggttctggcgacgccggcactttatcttcttcgatttcgcctgcaggaccgattcggcggaggtgattctcaacgacgaggcgcaggacttcatctggatcgacctcgaccggatcggcgaattgccggtggagcactatacccgcgtcgccatcgacaagtaccgcgagcgaaaccgccggtgaccaggctggtcatggacttgccggggccgtgactcccacatcgcaaaggagtggacgattctgaccgtgggtgctataaagacggtcggcgtcaccgtgtggcccactggaagcgcttgcaggccgcctgtgacggcggaatgtttcgcggggacgcactttgcgagagggagtgtgaacgatggaaccagcttctgggaatcgatggcgacgccagcgtcgcaatgcgctcgtgtttctgtatgcggcctttcttctcatgggtgcactgagcggactgctctgtttctcggccgacgagggtgcttcccttcgtgtccagttactgtttgccattgcggtctcgctcgggttcatgtggtactgcacggccgatgcaaggctcctgggtaagccactcctgccattggccagggtcggcatcttcgcgttctggccggccggcgtacccatctacctgctctgggcgcgccggctcagagggctgggcatcctgctcctgcacggcatctcgttgctgttgaccttcgtggctgcattcctggcgacggcgtacctggtctacggcgaaaggcttctcggctgagtcttcgccggcagatgctgtacatgtggtgtgtgccgcctgtatgatacaggcgtgatcgagcacgaaggagtggcctatggatcgggtgcggcggtgtcttatctggattctgttcggctgtggaatcgtggcggcttctcccgtgccgggtgacgtgggctatgccggccggcagggtgtgactctctatgtctcggaggtgggggacaactccgatggactgatctgggcgcgtgcgttccgcacgatccaggcggcgttgaacgccgtgcccgacgacggcgggggccatcgggtgatcgtccggccggaccactacatggagcccaacctcgagacgccgcacaagggcgcgccgggcgcctacaatctcctgattggcgatgtcgatgggcgtctcggttcgggcgcgcagggttgggttgtgatcgacgcgggcctgttctgggacctgacgcacgagagcggcgcgggcttcaccgtcctggtcgaggactgccggatgatcgtactgaacttctctcagccgatgatcagtccttcgacgggaatcatctgctccgagcggaatccgcaattactgcacgtcgatctgaaggactgcattctggccggctatcaggtcttcggcaccggcggccatgacgagaagatttcctacaagacggagggtcgcgtacaggcctatttgcagttcgagcagaccgctcccgccggcttcgagcgtctgggcgcctggccgatagagctgttcttccgcatcgcaccgccgcaggtgagaaacggtgttatcgactggcccgcatggcgttagaagtgtgcactcgtgaagtccggaggattgcaaccgcaagtatggatcaggatatggcgtgaaagcgaggtgtgaggatgtcaagccgttgccgtaacagacaggctcgtattctgagtcgatacagggccgtgacgtgcgtgtgcgtctttgtgatgagtgttgcacccgtggcggtggtgcgcgcggcagacctggtgttcacgcatttcacgattgccgatccgttgcccggctcggcgtgggggacgggcggcagcccgctggccgactatgacggcgacggcgatctggacgtggtcatctcgcggcgcgagccgaagaccgcctactggttcgagcggaaggacgacgcgaactgggtccgccacgtcatgggttcggccgagggcctggccaataccctgggcgcggcggcgctggacatcaatgacgacggttggctcgatgtggtcctgacaaacgtatggtttgagaaccccggtggtctgctggagaaccctgacacgccttggccggcccacgacttcgccggcgggggacacgatatcgtcgccgccgacatcaacggcgacggccggctcgacatcgtcacgtatcacggcacggtcgtctcgtggtacgacccggccgacggcatgaagcagaccgacgtaggacagggcgaggagaaccacggtggtatcgcccccaacggcatcggcgatctcgacggcgacggcgacctcgatatcgtcatcccggcctactggttcgagaatcccggcaacacgtcccgcccctggcggcgatacgaatggccccatctggcggtgcccaacgcgtcctacgggaccagcatgcgctcctggatcgtcgatctcaacggcgacgggcgcaacgacatcgtgtacagcgactgcgacaccggctggtcgcacgtctactgggtcgaggacaccggcaaacgaccccgctggcaacgccatcttctcgatgacccgcccacgcagccgggcgatgtgccggggaccggctcgtttcactcgctcggcgtcgcggacttcgacggcgacggcgatctcgacgtcttcgccggcgagcaggaagatcccgacacctatatggaatccagcggcaagctggccatgaagcccaagggtctgaaggaacgcggcgtgatctggctcagttccggcggatggagtccgacgtttacgcctgtcgtgctgcacgtcgacaatcccggctggcacgacgccacgctgggcgacgttgaccgcgatggggacatcgacatcgtcacgaagatatggaacaaggacggcgcgacctatcacgccgactactggcgcaacgacacgccgagatagaccatcgccgtctgttcgtcacgtggacgacgtgagcttgggcctgcgcgccagaagccacatctgacgcagcttgctgcgcagaacacgacacagggagaaacggatcggagccagcgtcggcagctcgaaatccgagcatggttcgcccggtggatcgcccaccagttcgatccggtcgagatccagaccgtcaaactgcatccggctcgcggcgcggaggagggggacctgcccgggattgatgccgagcagccgacagcacacggtctcgcacgagagcggatcggtgcctccgatcagccagccgaggggcttgctgacgcccctcgacggacctgttcgctccatcgcgacgatgccatcgatgagcgtcagtgccggccggaggaagtagcagatatcgatcagcagtctgcagaatctcgcagagtcgcctccgtatcggtaatgccacagtgccttgcgcttgccgctgacgcatccgaacatgttcttgactgccagggtcacgaggagctgaccgtgggccttgagcttcggcaggttgataatgacatcggcctccagcgccaccgcgctgagcccgactcgcggaccgccttcgcggacacgccgcatagtcggccggtccagttgtcgcagaggcacacccagtctcttcaacggctcgaccaactgcagcgcctcggcgcaactctgcacgtctccccatccgggtgaatcccccacaaagggcctggccccgaagtccttcagaaaccgtgcggcagccagaatcaccgcgggatgggtctgtgtcgcgtcttgtcgatgcgaccgtggggcgatgaagttcggcttgagtagaaccctgtcaccgggcttaacgaatcgttcaatgcccccgagcagccggaaatgacgctcgatggcttcggcaaccctttcgggttcatagtcccggcatcgaaccagcgaaacgacagtcctgtcggccatggtcaatcagtcattgatgcgcgtacagaccagaacgaatacgcgaaaggccggacggcgtttcggtggctctttcgcctccgcgtggaagaacagcaccggttccggtcgattgaagaaccgcccgcccagagtgagggtctcgcccgaatagctgtcgggcgccagcacgagcaggtcgcccggtgtcatctgggcggcgaatgccgccgagtcgaagtagaactcccgtcggcgattctgttcttccagctccggaatcgcgctggtcaaggcgagcgtatatacgggatacgcgatgattttccgcacgccgcgtgcgccgggaatcgcctgctcgcgaagccgcagcaccagcagaccggggccagcttccaccgtctgagcggacaaatccgttccgacgaagtgaatccggctgttcggggaaacaccggccacgggaaggtcggcgggttcgtcgttgccgatcaccagtgaggtggttccggcatcctgggccccggctgccgccagcagatcccgaacctgctcccacatcgtcgtgcgtcccatgcgcacacggaaggagttgcccgcaaaggcactgtagctgttggtctggatcggcttggccgagagtgtctgccagagatcgtcgagcttgcggatgttctcggccggcatgtccagggcatagatgtcgaggttgaccgtcgccaggaattgcgcccggcgcgacggatcgggcgactggggtgccagttcgccgatcttgacctgctcccagattggcaccaccggctcggacgactccttgcagccgcccagactcagccaggatagaatcgccagcaggatgatccgcagggcacgcatggcgggtagcctacccgtgcggccaccccttgtcaacgtccctggatttcgattgaccctccatgctgccgattgataggatactatgcgagcacagggcagacgtcacggccagatgtacgcagcagattccaacgcgccatgaggaggttcggtcatgtccagacagacacatcatgtgaacagcagcagtcttggtggcacctcgcggtttgtggtatgggtcggcgcatcgcttctgctcctgccgctcgcggcggtccgggcgcaagacccgacccgcttcgaagccgacatccaggcgttcgagcggatggacgcgaccacgcctcctccgaagaagccggtgctgttcgtcggttcctcgagcattcggatgtggaccacgctgacggcggacttccccgactacccggtgatgaatcgcggcttcggcggttcgtacatgagcgatctattgtactatttcgaccgcgtcgtcgctgtctacgacccggctctgatcctggtctatgagggcgacaatgacctgtccggcggaaagtccgtggaccaggtctacggtgagtatctgcagtttgtcgcgcgggtcgaggcgcagttgccgcaggcggatgtcgccttcatcgccaccaagccgagcccgagccgggcccagtatgtggaggtcacgcggcagttgaacgagcgtctggaggctctggccgcgaccgatgcgcgcctgtggttcatcgatgtgttcaccccgatgctcaacgaaaagggccagcctcgtccggaactgttcggcagcgacatgctccacatgaacgccgccggctacgagctgtggcggtcgatcatagagccggtgctggcggcgtgggccatgcccaaggtacaggtcctgctcatcgatttcggtgcgtcgggcacgcccacacagaacggtccgtcgccggacgatccgctgagtttctggaacaatgtgaccgaagccgtcggcggtgtggcgggtgggcatctttccggcctggtcaataccctgaacatgccgacgtcgatcggtctggagattctcagtccgttcaacggcagcggcccgaacaccaacgggaccctcgaatcgaccgtcttcccggcgaacgccacatgcgattcgctctatggcaacaccgagacctggggcgggctggccaacgtgacgccccgcttcaagttgacgggcctcaatcccgaacgggtgtacaacttcaccttctacgggtcgcgtctgggtgtcaccgacgtccgtgagacgagctatacggtcgcaggcgaaggaaccacgttcgtgacgctcgatcccgccaacaacgtcgacaaggtcgcgacggcgctgggcattgtgccggacgcgatgcatgagatcaccatccatctggccccgacggcgaacaacaataacggatatcactttgtctatctcggcgtaatgaaggtcgaggaaatccccgagcagcagccgatcgttttcatccggcagcctgccagccagacggtggtggcctaccagtccgccacgttccaggtggaagtccagagcacgccgccctatgtcgtccagtggtacaagaacggcggcgcgatcgccgacgccaacgagttcacgtacacgatcgacattgtgacgccggacatggacggcgccgtgttcacggtgggcgtcagcaacatggtctacagcgccctgagcgaaggcgcggttcttcgcgtgatccccgacgtcaacgcaccggttctgctgtcggcccagagcaccaacggctacacgattacactgtccttcgacgaacggattgacccggaaacggccgccgtggcgcagaactacagcgtcaacgagggggccgttgcggtccttgccgccgaacaggctgccgatggccgcaccgtcatcctgacgctggagcagcgcgttctgggccgcttcacggtgagtgtcggcggcttgcgggatctggcgggcaatgagatcgccggcggggccacggtggcagggcaggtgcgtccggaggttcttctggtcgatttcggcgcctcggatactcccacgaacgacgatccgaccaacgcgtggaacaacgtgacgcagagcgtcgggtgcgtggacggcggtcgcctggccgctctggtgactgtcgagcacattccgacaaaggtcgatctggtcatcatccggcggttcaacggggccaacaccaacgggacgctcgcctcagcggtctttcccgcgaacgcgacgcgcgattcattgttcggcaacaccgagacgttcagcggcctggccgatgtgttcccgagcttcaaactgacgggactcgaccggttgctgacgtatgatttcacgttctatgcctcacgcatgggcgttcgggacaaccgcgaaaccggctacacggtcgccggcgccaacgcgggctttgtcgccctggacccgtcgggcaacgagaatgcgttcgtgatggtgaccgggatcgctccggatgacgccggcgaaattcgaatcgatctggccccgacggccaacaacgtcaactccaaccactttacctacctcggcgtcatgaaggtcgagccgacgccggccaagtaacggcagaatcccgtggcccctctcgaccccagccgggaggggccgttccttccatcggaccggcagggcgggttcgcaacctgcgcgtccttttttcgcctccttacgccaaccgtattggctctgcggcagccaatcaccgggtcgggaattcgcttgactcagggatggttttgggtctaatgagccgccgattattcagaatgaaactccatcagaaagggtgctttgacgatgaagatcagccagagagccaggagcgttcccccttcggcgacgatcgccgtgacggcccgggccaaggaactgaaggcccagggggtcgatgtggtcggttttggggcgggcgagccggatttcgatacgccggagtatatcaaagaagccgcgatcaaggccctgaaagaaggcaagaccaagtacacgcccgccgcgggcatcattgagctgcggactacgatcgccaagaagctcgaacgggaaaacgggctcaagtacactcccgagcagatcgtggtcaacatcggcggcaagcactcggtctacgaggcgatgcaggcggtgctcgatccgggcgacgaggtgctgctgccccggccctactgggtgacgtatccggaggcgatcaagctggccggcgcggtgacgaagatcatcgagacggacaaagccaacggctacaaaatcacgccgcagcaactccggaaggccatcacgcccaagaccgcgatgctgatcctcaactcgcccagcaaccccggcgggttcatgtacacgcccgatgagctgcgggcgttggccaaggtgctcgaaggcaccaacatctgcgtgatgtccgacgaaatctacgagaagctcgtctacggcgactcgaagttcgtcagtttcgcggccctgagcgacgacgcgttccaaaggacgctgaccctcaacggcctgagcaaggcgttctccatgaccggctggcgtctgggctacaccgccggaccgctggacgtcatcaaggcgatgtcccgcctccaggaccacatgacctcgaacccggtgacgttcgcccagtatgcggccattgctgccttcgggccgcaggcggaggaaacgatcgagaagatgcgggtcgagttcgccaaacgcggcaagtacatggccgagcgactcaatgccattaagggcgtccgatgtgccgagccggcgggcgcgttctactgcttcccggacgtttccgcgcacttcggccggaccatcggcggcgtcaagatcggcgacagcatgcaattcgcctcggccctcctcgagcaggccaacgtggccttggttccgggcctgccgttcggctgcggcgacaatgtgcgtctgagcttcgcctgttcgatggagcacatcaagaagggcctcgaccgcctggaaaagtggctgagccagtaacacaggcagtcggcacagcgtcaggcagtacgaggccgaccggcgcagcggccggctgggcggcacggcatgcgcgggcgcgcacgtgaatcttgttcgcatacagtcttcggcaaaccgcaacaggacagcgggggttcttgacgatatacggaagaagcagtattcttctacgatactatcagccgaaacctgttggaaagtgcgcgaatggcggcaaatgagaccggcgagggggacatactgttgacggccgaaggacgctcggcatggtccgtgtgcgtggcggtcgccggctggctggcgatgctggtcttcgcctttcacgcctgtacgcacatggtggccgccggcgacacctgggtggcgatggcgtgcggacggcactttgttaatcacggcgtcgataccgtcgagcctttcagcgccaacagccaccgcgccggcccgaccgaggccgaggtcgcgacttggccgggctgggcccgctggatcaccgagaaggtgggcctcgaaacggttcgcaagtggcatccgaccggctggatcaaccagaactggctgacgcacgtcatcttttatcgcctgaccaccctgttcggttcggagcaggagccgtacttcgacgcgctggtgttctggaagttcgctgtgtatttcctggcggttgccgcaatctacgtcaccgcccggctgctgggcgtagaccctgccctggccgctgccgcctccggtttcgcgctgttcgtcggacggtccttcttcgacatccgcccggccggcttctcgaacctgctggtggcggtcttcatcctgattctggcactgaccagttacaggaacgcgctctacatctggctgatcgtgccggtggtggtcttctggtccaacgtgcacggcggctatatctacgccttcatcgtactcgtcccgttcatgggctggcacataatcctgcaccttccgaagcgctggctggtggcggtctacagcattctcacctggctggttctctatggcctgacccatcagtttctcggtcgtcgggctgaactggtggccgagtatttctcacagagcaacgcgggcgctgtcggtatcggcgactggatgattgtcctcctggtgctggccatcggtggcagcattgcggcggtttcgcatcggcagatcggcgaccgcgcgttgacggctttgcacggcgtagcgacgtgtgtggtgttccttctggtgttggtgcggtacttcccggcgccgcccaacacaatgaacgaacgtattctgaagatctttgcggatcacgcggccgggggacgctggacgtgcgtcggtatgttcgttctgtccatggcgttcggtgcggcggtgctggcggtaagagagaagggcattcgcgtgttggatcgccggacccttctgcacacgctcggcgccggagcggtcgcgttcgtcgcgatggtcgtgttcaatccgttccacctgacgaacctgacgcacacctttgtgatctcggtcagcaagcacgcggaacgttggcgcgacgtgcacgagtggcatcgggctctggactggacgaacccggttggtaccgccattccgtttctgacaatgtacattttcgcctggctcgctctgctggtctgggccgtcctgtcggtgcggatggcgctggccgaacaatacccgaagaagcgcggcgggaaggccgaggcgcccgccgaagcctcgatcgacgtcgttttcattattgtggctgcgctgaccgtctatatggcgctgcggtcccggcgattcatccccattgccgcttttgctgcctgtccagtgatcgcgttgctggtgcagcggatcgtggccgccatcctgaccctggcggacctgcgtggtgccgctcggctgcccgatccggctcgggatgagctcgtcgaacgcctgcttctgctcgggctggcgggggcgctggccgtcctggggttgtggcgtctgctcttctggcgctggctgttcttcccggtgccgggtgcgcccacgcagattcagccgcgtttctggctgctggcgttcggaacgctcttggccttctcgtcatttccgctggttaccgtgttctgcggaactgacaaatccgcgggaggtaccagacaggcgggcgccttggcgttcctcaagcgggcctggcaggttgccgccctgatggtcttggcgtctgtcatgggttttggcctgtgggtagggctgaggttcaagctgatctacctggattactggccggcggacccgaagctgacgtcggtcttcatgcggatgaccgcctccgatgccaagccgttctatgcctgtcaattcatccgcgagaacaagctctcgggcaacatgttcaactactggaccgaaggcgggttcatcgcctggggtcaggaccccgatcccaacacaggacggacgcccctgcaactcttcatggatggccgggcccaggccgcctacgacacccggacgttcgacctctggacggagatcctggcgggcgggccggccgccagaagggccgcgtacgagggacgggacccgaccgccgccgagctgagagagatcgggcagtgggtgaccgagcaactcaacaagtttgacgtctgggtggtcctgatgccggccaaccagttcgacaaggatttcgtccgcgccctcgaatacgatcccaactggcgtctggtcttcctcaacaacaagcagaaactgtttgtcaacgtgacgaccgagcggggcaaggagttgttcggaggcatgtttaccggccggaccacgtatccggacgagttcaccgccaacttctccgtcgggcacaaccttctattgtctgccgaggccagccagagacagcagggtctggacatggtcatcaaggcgttccatctcgatccatcgccgggccccatgctggacctgctggtgattgccgcgcgctatcccgaactccagcagcgggtcaacgagatctgcgtcgagtacaccacgcaattcgagaagaacaagtccagctacgccaatcacgatggctacaatctccggctggaagcggcgcgcctggcgatggtgcggctcaagcaggtcgccgaggcccaaggcaaccgccaagtcgcccagacctgcgagaaccagatgaaacgctatctgatcgaaagagacctcatttccgacaggaagaggtggtaagcgatggcccaggcggacaggcggacgtcgtcgggtgagcaggcgcagtcggccgtgtcgatctcggtcttttttccctgctacaacgagcaggccaacgtggcgcgggtggccgagcaggcggttcgtgtgctcgaagggctgggcgccgactacgagatcatcatcgtggacgacggcagcgtcgacgagaccggacgcattgccgacgagatggccgccggcaacgatcggattcgtgtcatccaccatccgcgtaacctcggctacggcgccgcccttcagtcggggttccgcgccgcgcgcaagaagctggtcttctacacggacggcgacggccagttcgacatcggcgagatgccggcgctgctgccgctgatgaacgagtacgatatcgtcagttgctaccgcatgaaccgtcaggataacatcgtccgcagaatcaacgggtggctctggacaaaggtcaccggtctgttattctcgctgaaggttcgcgatgtggattgcgcctttaagctgtatcggcgttccctcttcgaccggatcaagatggaaagcaccggggcgctgatcgacacagagattctggcacgggccgcccggaaagggtatacgattacgcagagaggagtacatcactatccgcggacggccggtcggcagaccggagccagcctccgtgtggttctcagagccttcaaggaactctggcaactgcgtcggcgcatcgtacaggaaccatgaggggatgacgcggctctccggcgcaggccaggcagtctatgcacagacgaaaagccaacctctttatctacggatcgcttcgagacagtcgcatcttcaagtcggtcagcggttttgccttcacgcgcaagccctcgaagatcgacgtcaaaacgctgtttgccgagccggcttttctcccgggtcatcgacgggtcagcccggataacgtgtatttctacgccgtcaaggctcccgacgcgagaatcgaagggtttgtgatccatgatgtgcctctctcggcattggccgaaatcgaccggtacgagggcaaacgctaccagagggagacggtccacgtctataccgcacacggcaaggttgaagcccaggcctatctcgtgaccgccgaatcgatgcggaaacgcttcggcgaccggtttcacgtcaatctcatccacgagttgtggctccgcaagcggatcaaccggtttctccagaagcacacgcgtcccggcgagcggaccgtcgatgccgaactggaacgtcaggccgaacgcgagttgctggccacgaccgagcgtgacctggtcatgagccactaccataccgatgccatcagcgactactggctggaacgggagctggaccggccccgcccgagcatccgccatctgttcaacgatccggaggtgcagccctacctgcgcaattacctgtcgctggttctgcggcaggtgcttctcaacgagttcgacgagcaaatccagaaccggtaccgtttcgacctggagcacatgcggaccagcgagcggtacttcgcccggtcggtcagtctgctggcggctctgcggatgatcaacgccagccgcagcgtggtggacctgatcatcgagcggggcctcaacatgatgccgtcggagaaactggacctgatcgattatgtcaagtacgccgtacgcgcttcacggagcatcttcgattctcgcgtggcggaggcccacctgcatcggattcgctccaatctccagccggggctgatcccactcggctttgagttggagctgagcaatctgggaccggacgcgatcgaatccagacgcagcatctgcaaagcggtcgatccggcctacgacggcttccggtacttctacgacttctacctcgacgtgctctgctggaagctgggaggctacatcgacgaccacaccggttccggccagcgaaggcggacctccggatttctcgaactggcgccgggaaggctcagcattgccggcgatctgtcgcgacccgccagccccgatccctggctgctgaaccagttgatccatgagctggtcagctttttccaggtcgagccacacagtcttcacctgtcatttcaactgctcaagagccgggtcagggagcagaccatcctgcccctggggtttgtcaaatgcctgctggccttgggcggggggcccgaacgaagacccggaggcctgtgggtttcgcgcatgggccatgacgagatcacccagcacaaactcggtgaagaactggtgttcgcccgacgcagccggcgcaactggtatctggggggcgacgagatcggcgacaaggcgccggcccaggcgaccacctatatccagcagtacaagttcattcggttggagaagagggccaactacgagccgctgattctgtgtctcaagggtctgcaactggccttgaaccccggcgactacctcacggccgagcagcttcggtccgaccgggcgttgcagcggcaatacgagcaactgaaaagatgggcggccaagcccacgcagatcagctcgcgggtgatcgcccagtttgtgaacgccgcccagcagggactgatgatcgagcgccatcgtaagccggcacaccgcctgcattacatcgagtgggctctcggcgcgatcaccgttcagttgcggatgttcaaccaacaggtccgggaagccgtttccggatcgaacgagtaaccgaaccctctctgctggctggcgtattgttcgtcaatgggtctccgggtcctgacacatctcgtaaagtccgccgcccgcatggcggagcctgcccatttcgacgagcttgtcccagacttgacgcggatactgattcgggggctggatggccacgataccggaactgcggcctccgctgaaaggtcctccgcctaatgtggactctgcatcgagacgcgtcagcttcagacgctttttgaacgctttcatcgcctgcttgaggtaagccgggggcatgaagtcttcggatgtgccttcgctcatggtgatgctcctgccatggaccgttgggatggcctgcgttacatgagggccatggtagagtcgacatcgcaacgtgtcaatctgcaagcctcgccggcgacgcaaacagccgggcaggggtccgcgacgacgtccgcggcgcggtggccacaggggcgtacggcctggcgggctcccgatgcaccgtggctggcccgctcttgagttccaggcaatccaacacgcggcggaccctccgaaaccggggacgcagcgcccggaacagaagcgaggattgatacttgtcgctgtgcaaaaccagcagatgtgtcaggctgtcgctggcggccaggagtctgcgatacacgataagcgtgtacggcagggcgaccagccgcaacggcaggggggtcgagtgccatcccacgagcagaagacccttccatccgattcgacggagcaggttctccgggggacaggcggcacgcccgctgtctcccggcctgccacgcttcttctctcgccgcatttcgtcaccttctccttcttgtgtacgcaacgaccttgctcgcgacggtctcgccaacagggagtcgcaaaaaccggcgggcagagcatcgccggcagacagaaatgccgggattgcccaggatggttggggtgccgcgccctcgtctgcacaggtctccaggctccgaccggcatcgtcttccttcaacgcggcgccccggcacttcaagcatatcgtgtatcttatagcaggtgacgcgggcacgtgcaattgtggtgactacgtataacgtgtcgttatttccgatggttcgggtcggtcttcagtggaaaccatcaagagcatggtgacacggtttggccgagcacgtgatcatgctacgacgcgttgcgctttatcacgcgctggcgataagcctttgttcgtttgagccggctgatggccacgcgggcaacgcgatcgtggtcgaaggcgaggttctccggcaaacggtcgatgggaaaccacttggcctcggcggcgtcgtcgcctccatgcacgcccgtttgccgtttgccggcgatacccgtgaagaccacagtgatctgccggccgcgagggtcgcgaccgaccgtgccgaaggtccgcaactgctccaggcgtatgcccgtcagtccggtctcttccttcaactcccgagcgacggcgtcctccagttcctcgtccatctcgatgaagccgcccgggatcgcccaccggcctttgtatggttccttcttgcgtttaaccagcagtagccacgccttgccccgcgagaaacaaaacactgccgcatcgaccgttaccatcggccggggccactggtacacatacctgccctttttcgccatgcgtcaaatcctctacagtccgcgtgcatactcatgtcgaacgcgtcgcaggacgtcattctatcggcctgcgtggacatttcaacggccgatcgcggatcgcccgttgcttgcagaccggcgctgacatacaatccacaacttatgtccagtgcatggaagaacattctcctgatcaagcccagttcgctgggggacatcgtgatggcgttgccggcgttgtcggcgctgcgtcgcagctttccgcaggcgcggatcacctggcttatccgtccggcgttcgccccgctgatcgagggccatccgcacctggacgagatcatccacttcgaccgcaagacgctgggcaaggcgtggtactgcccgttcgcgatgaaagccctcgggtctctgatcgcggacctgcgtcggcatcgcttcgacgcggtgctggacctccagggactgctgcggtcggcgtcgctggcttgggcttccggttgcaagcatcgcttcggtccggactggggccgggagtttgcgcactggttctacacgaccaccgtgccgcggcacgccgactgggtccatgtgatcgactactacatgaagatcatcgaggcgatggggggctctgaccttggcgtcgagttcgtcctgcccgagaagccggcggctgcggaagctgttggcacgctgctatcgcagcatgatctggctcgcgaacggtacgcggtgctgatccccggttccgcccagaccagcaaatgctggcccgccgagcggtttggcgtgctggccgaccggctggcctgcgagcacgggctggccatcgtcgccaccggaagcagtactgagagcgcgatggtcgagcggattcagagtcacgcgaagcgcccgatcgtgaatctcgccggccgcacctcgctgcccgagctggtcgaggtgctgcgctccgcccggatcgtcatcagcaacgacacggggccgggccacatcgccgccgccctgggcaagccgctggtgatgatgttcagttggtccaacccgctgcgcgtcggcccttaccgccggcccgagtgcatcgtcggtcgtgacatcgccacgcggggcctggccatcaagagccgtgatccccagcacgcgattcagcacatcaccctcgacgaagtctacacgcgagctgcgcagcagctcacaggccgtgggctgtaggccagagactgtaggcaccgacgattgaccacgctctcagggacactccgaatctgatagaatggtgtcgacgtggggagggtaatttccatgctggacgatagccatgtgggggcggagggacaggaaatgcgcgatcacacagaattgcgggcgtttgagttggcgaatcggtggctctgtgtctccacaaaatgacgaagacgtttccgacggaggaggtgttcggcctgacggcgcagttgcgccgcgcggtcgtctgcgttgctccggacatcgtcgaacgctgcacacgccattggcaatccgactatcttcgtttcctggacatggcctgcagctcagcgcgagaggtggaggatcacttgtcgcttgcttcctgcctcggatatctcagcccacaggactacgagtcgctccgtggtctgcgcacggaactctcaagggtcttgagtgctccgctcctctcgctgcgcaagcaataacggcctcctcgaacctatggcctcccgcctatgcggaggcgacgacggtcgcgcagcgctggcagaggtccggatagtcggcgttggcgccgacgctgggccagtagttccagcagcgctggcacttggcgtgggggctcctggcggcgacaacggtcgtcgtttcggcggatcgttcgagcctcacctcgctgacgatgcacagcgccgcgaacgcgtcgacgccgaatgcctcgatcacgccggcgtcttcgtcggtgcatcgcatggtcaccgacgcctcctggttgctggcgatggtcttgtcctgccggagtccttcgagaacgcgcaggacgttgtcgcgaagggccatgatcttctgccatcggacctgctggctggcgtagtcgatgctcgtatcgaccgtcggcaggttcgccagatgcacgctggtgcaatcctgaggcttgaacggcatggcctcccacgcctcctcggcggtgtgggccaggatcggcgccaagagccgcacgagcgcactgaggatctcgtacatcaccgtttgaccactgcgtcgtgacagcccgtcagcggcgtcgcagtacatccggtccttgaggacgtccatgtagatgctgctcatctccaccgtgcagaagttgtacagcagcgagaagacgcgatggaacacgaagttctcgtacgcttcggtgacgtcggcgatcagcttctgcaactggcacatggcccacttgtcgatctcgaacatgtggtcgtaaggaatcgcgtcgatggctggctcgaagccgtcgaggttgcccagcaggtaccgcagcgtgttgcggatcttgcggtacgcgtcttgtgtgcggccgatcagctcatcgttgcagcgcacatcctcctggtagttgacactggcgacccacaacctcaggatgtcggcgccgtacttggcgatctcgtcctgggcgttgacgtagttgcccagtgatttggactgcttcatgcctttctcatcgacggtgaaaccgtgcgtcagaacgctcttaaagggaggtttgcccgtggcgcccagcgccggcagcagggacagttggaaccagccgcgatgctgatcggacccttcgaggtacaagtccaccggcaccggccagccggccgccaccgcgacgctgtaccagctacagcccgactcgaaccacacgtcaaagatgttctcctccttgcggagctggtcgaggtcgaaccctgcgggcattgggaagtcatctcccagaatctcgcggggtgagtcggtgaaccaactgttggagccatgccggccaatgtgtcgggcgaccgccatcacggactctttcgtcagcagcgttcggccatcgggcatcgtgaagacggggatgggcaggccccagcttcgctggcggctgatgcaccagtcgggccgcgattcgagcatgcctgcaattcgtttctggccccacgcgggaatccagcggaccttttcgaccgcgtccatcgccatcgcgcggaggttgcggccggtgtcgggcaggtccttgtccacgcccacgaaccactgctccgtcgcgcggaagatcaccgggcctttgctgcgccaacagtgggggtagctgtgggtgatttctcgctgggcaaacagccggcctgtttgcgccaagtgctcgttgacctccttgtccacggtcagcacgttcttgccccgcagccagtcaggaaccgtctcgtcgtagcacccgttgtccttgacgggtgaatacaccgccaagttgtaccgttggcccgagagatagtcctcctggccgtgccccggcgccgtgtggaccaggcccgtgccgtcctccgtggtcacgtactcggcgaggatcaccatgtaagcgtccttgtcggtcgggttgtcctcgatgaagggatggcggtagcgaagcccttcgagttcactgcctcggaccgtcttgggaccgacggtgtattgaccttgcaccaggccgcccgccacgacgaccgcctcgatgcgatcggtggccacgagcgaggtgtacttgcgtccatgcttctcgtacgagatggcggcgtattcgagattcggatgtacggcgatcgccaggttggcggccagcgtccagggcgtggtcgtccagatcatcagggcgacctcggaatccttggcctggtcgtttgtgacgactcccagctcgatcagccgggcggtggtctccggcgtggcgctgaagttgacgaagatgctcggcgaagcgatgtctctatattccagctccgcctccgccagcgccgtctcgcacccgacggaccagtgaatcggcttgagctgacgatagacgagccccttgcctaccagcgttgcaaagacttcgaggattcccgcctcgtactggggcttgaaggtcaggtaggggttctcgaagtcgccgaacacgcccaggtcctgaaactgccggctctggagcttgacatacttgctggcgtacttcatgcactcgcggcggatctccgtcttgctcatctgccggaccttctcgcccaggtcggtcattaccttggcctcaatgggcagaccgtggcagtcccagcccggaacgtacggcgcgtcaaagcccgccatcgtcttgtacttgacgacgaagtccttgagaaccttgttgatgacgtggcccatgtggatgtcgccgttggcgtaaggtgggccgtcgtgcaggatgtagagcggggcgcccagccgggcctcacgaatctgcgtgtagatgttctctttcgcccagcgctggcgcatctggggctcgcgctgcacgaggttggctttcatcgcaaagcttgtctgcggcaagttcaacgtatcgcggtagttcttctggttcttgtctgccatcgtcaaggtccttgaaatctcggaaatcgaatcgcgtatcttagggtttgcgccggccgctgtcaacggaaccccaaacgcatagggcctgcgtcgcaaggatggcgaaggcctcccaacgaaagaagccttccggagccggctgctctggaaggcttctgtggttgcgggatcgaggcattctcagggcagcttcctgtggtctccaatcatagcgatcgggccggcgcatatcagtcgcgttgccgtcccagccgctgctgccccgaattctctaccgtttgccttctgcacaatgcgctctatgaggttcgatctttgccagaactctcggcccacgtctaccatgacttcagttctcagcagttgacgctcctgcgccttgccatcgcaggaccgcgaggaccgggttgtgatcggagacaaccggctcgtcgacaatagtcacctgctcgacactccacgagtcggcggaacggatcaggatgtagtcgatcttcgagcggggagcgaggacgtcggtccagccggcgtcgagcagaacgttcattgggcgactgccgggccgggcgttgaagtcgccggccaggatcacgggcgcgccatcttcggtgccaaacaactgggccagccgcatcgtctgctgcgtgcggatctcctcatccagatggcacaaatgcgttccgacgaaccgcagcgggccgatgccctccggctcgatccacgcctcgagggccgctcgcggttcgcggtcgccccagtagggaagggggtgcacagtcgtcttgaggatgggaaaccgcgacagaatggcttcaccgtagcggccgccctggtgcggcatcgcttggccgaaggcgtggtgcatccagcagagcttgccgagaagcgccgcctggttgacgccggaagcccgctcggtaccgtcgtcgacctcctgcagagccacgaggtccggtgacagatcgttgatgaccttcgccagacgcttgtagtcgaactgctcgtccatcgcctcgccgtgatggatgttataagtcaacacgcgaagcgtccgcggcctcggcgcgcggaccgatcgcgcttggcagccgctcagagccggaagtgacacaatggccagaacgaatgcaatgactgctcttctgttttgtttcatatcaccacctgcgatcggagattcgacattccacggcgacacaacattccttctcccgtgacgttcgtttgatcttccgcaacggacggtctgttgtcaaacgcggatcctcgcaaagcggcgtttgccgacctgaatgaccatgccgtcggccggtgtggtcgcggcgttggggtccgcaactttctgcccgtcgatgctgacgccgccctgcatgaccatgcgtttcgcttcaccaccggtctcgaccagcttgcaggtcgtcaggagctgcttgatgctgatcggctcagccggcagccggaactcgggaatctcgtcgggcaactgcccctgcgcgaagaccttgtcgaactctgccgccgcgatctccgccagctcgggaccgtagaactgcgagacgatcgtcttgcccagtgtgaccttggcctctttcggatgggtctggttcggatcgagcagggtcgcgatctgctcggcgggaaggctggtcagcagcgtgtaatagttggccatcatctcgtcgctgatgctcatgatcttgccgaacatgtcgttcggcgagtcggtgacgcccacgtagttgcctttggacttgctcatcttctccttgccgtcgaggccgacgaggatgggcatggtgatgacgatctgcggcggctggttgttcagccgctgaaggtcgcgtccgacgaggttgttgaaggtctggtcggtgccgcccagttcgacgtcgcttcggaccatgaccgagtcgtacccctgcatgagcggatagaggaactcatgaatgccgatggggtcgccggccttgtagcgcagctcaaacgtgtcgcgttcgagcatgcgggcgaccgtcatgctgctggccagcttgatcaggtcggccagattgagcttggcgagccactcgctgttgtagcggacttcgagcttgtcgggcgaggtgttgaggatgtgtccggcctggttgaagtaggtgcgggcgtttcgttcgatctgctccggcgagagcatgggccgtgtggtgttctggcccgtggggtcgcccacccgggcggtgtagtcgccgataatcaggaccgccttgtgccccatgtcctggaactggcgcatcttgcggagcacgaccgtatggcccaggtgaatgtccgggctggtcgggtccagtcccagtttgatccgcatcggccggccggcttgggccgcctccaccagtcgctgggccaggtccgtctcggtgtagacctccacggtgccccgtttcaacgcctgtacggtctgtaccacgttgtccgacataaacctgcctctctatcttcgttgccgttcgaaagaagaagtggcaatcttagtcagacggacagacgaatgcaatcgggaaatccaccccgtcgagcaggggcggcaacgaatcgcgcggctcgcttgccgatccgtcgcggtccgggtatagtcgccgcagcggccgggtatgttcggaggccgatggtcgcgaggattgggatggaagactgtgcagaaatgccgacggtggaggttgtcgaggccgatttggattgcgtcgcgcaccagcgggcggtggtcgaactgattgatgcgtacgccgccgatccgatgggcaatggccggcctcttgcgccgcaggtacgagacaacctcatcgacggtctgcgccggcaccccacaacgctgatcttcctcgccttccatgacggtgaggcggttgggattgcggtctgcttcctcggattctcgaccttccacgccaaacccctgctcaacatccatgacctggcggtggtggcggactgtcgggggcggggaatcggccggcagctcctcgacgcggtcgccgacaaggcgcggcaattgcgctgctgcaaactcaccctggaggtgcaggagaacaaccatcgcgcgcggcgtctgtacgaggcggcgggattcgcccaggcgcaataccatgaaggcgccggcggctcgctgttctacacgaaacctctctgacgccaatgtcgttgcgtcctcaataggcttggccatcgccgtacaaggcatcgattcccgcctcgacggcggcccgtgactccgccttcatcagggtcatcgtcacctgcttgcggcaggggtgcaggcgggcgtagcggacgatgaacttgcggaaataaccgatcgcccgtttctcaggatagccgttcagcacacgatggaagtgttcgagcatgattgcccgctgctcggcgaggtccggcgggggcgggaccgggcgattctcccacacgcagcgcaggtcgcggaagatccacggattgccgattgcgcctcgggcgacgacgaacccatcgagacccgtccgcttcatccgttcgacggccgcgcgcgggtcgaagacatcgccgctgccgatgacggtggccgacgggaaccgggccttgacctgagccagggtgtcccagtcggctttcccacggtagcgttgttcgacggtgcgcccgtgaatgaccagcgcatccaccccttcctcgatggaccgcgtcacgatctcccagaagtcgtcctgcgaggcgctgtcgtgatcgatgccgatgcgaagcttgatcagcagcggacaggcgatggtctcgcggaccgtcttgacgatgtcgatgactgttctggggtgggccagcagggcgccgccccgcccgcgccgaaggaccttgggcaccggacaggcgaaattcagatcgatcacgtcgtacccgaccgccaccaggtcgcgggcggccttggccatgatcgcagggctttcacccatgatctgggcgcccaccggatgctcgtcgatgcccggccgaaagcaggccttccgcaggacgcgcggctcggccatgctcttggccagcatcacatcggccagcgcgaatggacagccgaaacgccgtgcgaacgagcgcatggtgtagtcgctgtacccgctgagcgaagcctggaagaatggaacgtccagcgtcaggctgccaagtcgtagggcgatgggattttgcatactctttccggggcgattctctgtgcgccctatggcctgtccatgtggtcggctttgggactgcgtccgtcccgactgtcgatggacggcttgccggtgagagtcttgaggatctcactggtgaccggcgggcatccgggcacgtactgcccgtcctgcccggaccgggcggcacagttgccgatacaaagggtcccctcaggcagattcgcattccccttgccgatggcgatattcagatgccgccaggacgggaagtagtcgaacaactggtctcgatagcccttcaggaacaacagcacggtggactgacacgcactgcaggagttcctgtcgaagaccgtgacattgggaaactcgatggtcaggttggccggcggcgtggcaaacggtgtaatccagtcctcccaatgatcgggcgtcacggagattgcggccaggtcgatgacgccgtagccccgcgccgccccgatcgccagatggggaacggtctcggcggtggtccccatgagccggcacgccaccgcgtcggccgcaaacgcatcggcgccggcgaccacggcatccatcgccttggcctcgcccgcgctgggccccagaccctccatgcccaccgtaccgtcgatgatagccaggtgcggacgcagcaccgacgccatgtcggcgatcgcgatgtcgatcggtttctcgtcgctgccttcgacgggccccagcatgtgcagttgcaccttgctccgccgccagaggcagcccttcatgttcttgaccgccagcgtcaccaccgtgtgcatgtgcatcttcatcaccgggatcgagacgaccagatcgtagtcgcacacgtcggcgcagagcttcagcttgtggagcgccacaccctgctcaatggctacctcgacgggcgggcgacggtccatgtcgatcaggccgcagccgcgttttcgggcgacgtcggcgattccggatgtgacgaacgcctccatggcgtcgacaccggtaatcgggctttcgccgacggccacatccgcacccgcttcgaccagcgcgtcgatcgcggccgcgacgacgtccggatgcgtcgtgatcccctcgcccggcgttgccacccggccgacgttgggtttgagcagcacgcgcttgcctcgcgcgggcgacaggtccagccccgccagggccgagcgcgtattggcgtacggcccctggccgtgggcgacctggaccgatggatgcgcagttgacttcaagagcggattctgtgctaacatagtcgttgcggcaagggcacgatacggggtttccagttgtccctcaagtcgtgcctggtgatcgtcaacaagctgcaaaatattcattatatcggttttctcacttcgctgtcaaacgctggttcgccttgcatccatagcgatccggatggatatcgcggtcggatacctcagaatgaccgccgcttgaggttgctaccggggcgggcgtatggtagcttcaaacgtgtttccggccgcgaggtggcttatcgagcctgaaaaatggagagattgaccggcacaagccgatgagacaatcaatggaagtcaatcgcatatcctgctcgaagcaggtgattcgaggtgcacgacattgagaagactgagcgtattgtccggcggcgtggtcctggtggccctgggagcagccgcgttcttcggccgcgggttcttccgaggcgcgatgacgatccacgatctgctcaccgagaaccagcagctcaagagcgccatcaccaatctgactgccgaggatcagatcggctatgccaaggtgatctcccaacgcaccgagagtgatgggcgcctgctgacgaccctgcgattcgtcgagaccagccgcgaggacaagacccagacgatccttcagaaggagtacacgatcgagggggacgtcattcatttcgatgccctgatcgtcaagttcacggaccagatggttatggacggcaaggcccgcgccctgtatatctggcgccgtgtctacggcgagaagatggcccccgaggaagggttgcccatcgagacgatgggcagtgagcccaaacgctacgccgacctgctcaagcttcttcccgccgaccagcgcgacctattctggtcccacatctgggacctcgcccacgaccccgaggccctgtcgcaatacggcatcaaggccatctacggcaacgtcatctattcccagctccgcgagggcctgatctacgtcttcaagattggtcccaccggccacctctacgtcgaagatgtccccgccatgtagcaccggctcgtctccgcttgctcggctgcaccgccgttgcgcgttgacgggtgggggcggtccgggtatggtgtgggcggcgttgtgatcggcagaccatgaacgggcggctatgcgaccggaaacggatttcgacattgtcatcatcggaggcggtattgtaggattggcctcggcgtacaagcttgtgcagaggcatccgcaggtccgtctggcggtgctggagaaggaggaccggctggcgacccaccagagcggccgcaattccggcgtgatccattcgggcctctactacaagcccggctccgccaaagcgaagacctgcgccgccggacgcaaggaattgatcgccttcgcccggcaatacaaaattccgcacgacatctgcggcaagatcatcgttgccaccgacccgcgcgagctgcccgccatggagcgaatcttccagaacggcctggccaacggggtcgaaggcctggagaagatcgggcccgggcgaatcaagcagatcgagccatccgtcgccggcatcggaggccttcacgtccccagcgccgggatcatcgacttcgtcgcggtggccgagcagttggccgaactgatctgcgagcaccggccggagaacaaggtcctcaccggctatcgggtcgagtccttcgacaggcacgatttctacctgaacatcaggacctctcgcgggcaggtcagcacgcgctacgtcgtcaactgcgccggtctccaatccgaccggatcgcctggatggaccgtgttgatcccggcgtcaggatcgtcccatttcgcggggactattgtgatttgagcccggaagcggcgcaaaaggtgaggaatctggtctatcccgtacccgatccggccttcccgttcctgggcgtgcacttcacacgcatgctctccggcggcgtggagtgcggccccagcgcggtcttctcctttaagagggaaggctacggcaagacggatttcagccttcaggacacatgggatgccctgtcgtaccggggcacctggcgtctgttccttcgccactggcgctacgggctgggcgagtgtgcccgcacgttctcgaagaagcggctggtcgcgcagctccaacggctggtgccctcgctgaccgtcgaagaccttcggcccgggaacgccggcatccgcgcgcaggccttaggccccagaggcgagttggtggatgatttcaagatcgaagcgacgcagaacgcgattcacgttctgaacgcaccgtcgccggcggcaaccgcctgcctggccatcggcgatcacatctgcggactcgcgacggagcgatttcaattgtgagaagctgatatgatcgacctggcggcgaagcggtacatcgttctggtgcaatgtcatatcgtcaaggaacgctgcccgggctacctttgtgagaaggccttccacgagcggaccggcggctttgcgccgtatccgaaagaccatgcataccggatgctctcgatgacctgcggcggctgctgtggacgcgccctgcatcgaaaactcacgctgctgctccggacgatcggcaagcaggaaggaatcaccagagagcagatcgtggtgcaactgtcctcgtgtatcacgaacgacaacttccacgcaccgccgtgcccccacctggactaccttcgggcgctgatcgcgcgaatccaactcgacgtgctcgatgccagcgtcatcagcgcgaccgccgagaagcgaagacgagaggggcgatatcagtcctgagtcgaacaccatgacaaggaagcacgcgacgcccagtctgttcgcctcccaggaaccgcccgagccggcgtgcacgcacattatccgcgtggccctggcctcggcggcggacacggaattcgactacctcgtgcccgatgcgctttggcccatcgaagtcggacgtcgtgtcgaggtgccgttcggcaggggcaacaaacctgaggtcggtttctgcgtcgagtcggacgttgtgcccgcgagggctttcgacagggtgggccgacaggtccgtctcaagcgggtcgccggcgttctcgacgccgagccgctgcttggccccgacctgatggagctggcgcggtggatcggcgactattacgtctgtccgctcggccaggtgctggcggcgatggtgcccggtgcggtcaagcgggcagccggcgtcaagaagcagcgctgcgtatatcttggcgcacgggccgaggagatcgcggcgaatctccgcagcgccacacagaagcggatcgtcagtttcctgggcgagcgcaaggcgctgacagttgactcggcggtcgagatggacgaattggttgcggcggttgattgccgcgcgcctgcggtcaagcgactggctgagaagggcatcgtcaaggtcacggtgaagaaggtcctgcacgccttgccggtggtgcccgaggcgatggctcttcccgaacgtgaggtcgtgctgaatgccgaccagcagcgcgggctcgaacagatcgtgcgtcagatcgagtccggtcgcttcggcgtcaccctcctgcatggcgtcaccgacagcggcaagaccgaactgtacatccgtgcgatcgaggcggttctccggaagggcaaggcggccatcgtgctgctgccggagatcgcgctaaccgcccagacggtgcagcgattcagcgcgcggttcgcgcggatcgccgtaatgcactccggcctgaccgccggccagcgcaacgtccaatggcagaagattcgagacggccagaccgatgttgtgatcggtgcccgctcggcggtctttgcgccactgcccaacttggggattgtggttgtcgacgaggaacacgagccgagctacaaacaggataccgccccgcgctaccacggccgggacgtggccatcaaacgggcccaactggccggcgcgcactgcatcttgggtagcgccaccccttcgctggagagccttcacaacagtcgcaccaggtccagcttcactctcgtccgtcttcccagacgcgtgatggacctgccgatgcccgagatgaagctggtcgatatgcgggcgcgcgatgccgtcgccgaccggcgggacctgctcagccagcctctggctgcgcacctggccgagacgctggcgcggaaggagcaggcgatcctcttgctgaaccggcgaggctacagcaacttcgtcttctgcccttcctgcaaatacatgctgcaatgccgcaactgcgacgcagcgctgaccttccacaagacatcgcgttcgaccgcgcccatgaaaaccgttaccggccggcatatggacttcggctatgcgatctgccaccattgtctggcccagacgctggtcccgcgggactgtcccgtgtgcggcaaggcgatgactatgatcggcctgggttcgcagcggctcgaagaggagttggcggcgagattcccgcaggctcgggttcggcgggtcgacagcgattccatggccagccaggactactaccggctcctgaaggaattcggccagggccgcatcgatatcctggccggtacccagatcctcgccaagggcctgcactttcccaacgtcacgttggtgggcgttgtcagcgccgatacgtgcctgtatttaccggactttcggtccaacgagcggacgtttcaattgatctcgcaggtggccgggcgggccggacgctcggagaagcatggcaccgtcttcgtccagacgtattttcccgaccagccgacgatccagttcgccctccggcaggatttcgagggcttcgtccgtgaggagatgaagcaccgcgaggtctgcacgctgcctccgctgtggcgtttggcgacgattgtgatgcgtgacgagacgtacgaccggctcgaaaccgccgcccataagatgcgtgtgcggatcgatgagatcatcgcccaccacggccttcaggcgaaggtccgcggcccgatgcccgcggtcatcagtcggattcagcggtttcatcgcctgcagatcgtaatccaggcgccgaccgccgcgatcatgggaaagctgtttaccagcctgcggagcgccccaccgatccgtccggcggtgaaaattgctgttgacatcgacccggtcgacttgttatagcttgcaatccttcgcgacgcgtgctatactgcatgtttcgacgaccggggagtagctcagcttggcttagagcgctgcgttcgggacgcagaggtcgcaggttcaaatcctgtctccccgatttcccctcgtcccccgtaagaccatttgacagcaagggtttatgaagggcaggcgtgacattcgattgcagttgatgcaccatattcgcacctaaattacccgaaagcaccgcgtcggccaccttctcggtgatgcccgcgaggcgatcattgcgagcgcgaccatagatgttcgcggtcaggtggggggtactgtggcgggccagttcttgggcctcccggtgcgtggctcctgcctcgtatgtaaatgtgacgaacgccgtgcgcagggcgtggaaggcaatcttcccctcggcggtcttcttcggtattcccgcccgaatcaggtctttgtccagttccctggctggatgggagggcacatacagcagggcgtcgggagggcacaggtactggcgaaaaaactgagcgtagaggcttggcacgaggccgcttcccgcgaaggtttcgagctctttcacaaggcggtgcggcagtggctgaaaaccggccttgcggttcttggtccaggcggggtccagtttcaggcccatgttgacggtatccaggtgccgccgggtcagagatcggagttccccggcgcgaagcccggtcaccattgcgatgacgtagagaatcttcaggtgcggcgccgctaccttcaagaggcgttgtgtctcgtccaggctcaaagcgcgatactgggatcgtggtgtcgtgtcgatcttgctcaatttggccagtgggttgtcctgtaaatagccgcgaatgacgagccaattgcacaagctgcgaagggcctcgacgagattgccaattgttttgcccgttttgcctcgggcggccagttcgcggatcgttgcttcaacacgtggcagcaggccgtccaagtcgcccaacgtttttagttccaatgtctgggcccatgaggtcaagtgacgggacttgtagtaggcgtgtttcgttgcccatgccctgcctttgtgcccaccctgcgcccgtccccaagcgaggtattcggccacggcctccatgaacgggcgacccctgtgcttcaagtgtgtttgcgacggctcgcgatagccgagccggatctgtcgatggtcgtcctccagcttcctcgcgatgcggagggtttcggaccgctttgttgtgcccgtgaagtattttttcttccccgtctggtcgatgaaaaacccctggtatcgaccgcttgtgcttggcttgtgcctcactccggccatgctactgcctcactttttgccaacatgcctgaagataagccgagacggacaaaccgctcctgcgcgcgtcctccatgagtgttttgtgctcggcgcgcgtcattcgaagggtgacgatctcggaaagtcgctcgctggccttcttcggcggcctgcccattttcttttttctgttggccatgatagcattatactttacgtaatcgaattaagtcaagcgctgatttgagagattcttcgttgcaagtgctcggcttccttcctggcggcctccagccgtctgctgatgtgctcccgcaaggcccgcacagtccaagtcggttcaccgaacagccgaacgctcgggggtagctcgccccgctcgacggcgcgtttgatgctcacgcgatgccggccgaacattgcggccagcgttttttcgctgagtaatgtatctggcgacaggtcgccaagatcgcggatgattcctgtttcgttggtcacgacttggctccttgttttgtccggccgggtggccgctgtcctcgccgttcgcgcagaccggtgatgatggcgtgttcaaagcaacggagcacctccagctccgtcacgtcgccggccccggcccgggcgcgctggatggcgtggagcgaaggaaggcgcgtagcaatctgacggcgcagaatgtcgatgacatcacccgccgcgcggctttgtagccacgccagacgcagctcgaaaaaggcccggtggaggatctccactgccgtccggatgtccgggacaaaatcgagcaactcggccgccgcgcgcatgagggcttcgtcccgcgcggcgaaccgtcgttcgacttctgacgcgtcgtatgttgtggtcccgtcgtcggcctcgtggcgcaggcccaactcgtggagtaagaattccatccggtcgcggtcgagtccgtgccgggccgccagttgggtcgatgtcaacaattctcgcttgtccatgtccatttctccttttgtttagtgttcccaacgttcttcgtcgccggcgccgacaagcgccggttcgtttttctgcttctgggtgtatcgccaagcggccctccgcatcaggcgggccagtttttcttcggttgtgtgtggcgcccgtcgcccgttctcctttgcaatgcggcggatattttcaagcaggatgtcgcacgcggtattggcgtcttccgggctcgcgcacagcgcgaacggcgcccacgtcactggccggccctttgcggagagccgacatgtcgatttgagggactcgtcgaggctcgcgatgttgaagcaaatttcattgttgtagacggacacttcggccacccacaggcgatggagggccagttcgatcagtcgttggatctcagtcatcgcgttttttgctcctcaaaatgacccccagttcgtggagcgtcaaagcgccagtgtctcctggctcttttccattttcgaaatgatatgccagccgcatgttctcgccttcgctagacctcgttttcaggaggtacatggtccggttgtgcgtccgttcgtccgttccgcacggcgtcttgacccgagagactttggcatcgtggctttcgagccagatgacgctgtcgagcgaccgtgcccacgcggccccccccgcaacgttgtcgagatcgggcaggcgaccaccgccctttttggggtgcgtgacaacgatcaacgaagcgcccgacatcctgaccgcttgctccacgcgggacagaaacttctcgtcctcgacccacggatcgccctggcgcatcaaggccgtcgtcgggtcgattatgatgatccggaacccctgggccgctcgttgctcgacccattcggcgccctgtgagatggtgaactggtttgggacggtgtagatcgattccccgatatgattgaggaactcacgatgctccgcgaataggcgacgaacggtgtctggatgttctcgaacccagtcgctccgcgtcagatcggcgatatttgtacgctgcgccagtatccggttgagatggaagctccggctgcgctcaagctccaggacggcgactttgatcccccgttcgatccaaacggcaagtgactgggtaatagcgaagctcttggaggcaccgccggcaccgacaagtccaagtcgcgagccaggcgtcaggccttggaccaggccggtgagccaaggccacggccacgctatgttgacaaacctcccggcgatctgatcctcgatctgggcgcccaactcagatgccgggtccgccaccgcaacgggccgggcaggcgatggctcaccgccaacccagtatggtccccatatttctcggttcactcgctcctgcaactcatggaggtcaccaccggcgccgcaccgccggcacttaaatcggacgatgccatcgcgagccgcgtagacgacgacgcttccggaaatgtcgatgcagaacgggcaccagatctttaccttccccccttcgccctctacgcttgcgccggccgccttcagcgcggtgatcagcgcgggcctgctccgacgttcggcatcgacttgcgtcatgatgcgccccctatcgcctctaccccagccctgaaagcatcgagcggaatgtcgtcggggtcggaccattgctgcccttgagccgtactctgcccgggcacctcggcccgagcctgtgctcgcgccatccaaccccccagaaatcgcatccaatcaattcgcttcctggcttttcgttcgttggttcgacaccatgctgctgccttgagaatctcggcccgagcgtcgattaaagggtaggcttcggaccactggcggacgaggtctttagagatgccgacgaatgcaaatccagcccagtcgtatgctacctttttcccctgattcgccatgaacgtgttcttgtacgtgttcttccttcttataccgacttttttggttggtacggccggtggggttttcgcggtacggctggtggggttttctgtcgccaaaaccccaatcgccggttgggttttctcatgtattgaaaccccaatactggttggggttttcggaggctgtgtcacggtgtactgcttgcggtgctccttgccccgtcccggccccttcgaccactcaaccaggagccatccggtcacgcgaagccgcttcgtgatccggcgcacgctttccaccgtcagccccagatcggcggcgatcatcgcttgtgacggccatcctgaattgttcttgccctggcgccaccaaaggtacatccaaacgcggaactctacggccgacatctccgtggcatgcagggcgagcacccaaaggggtggagtattcttggccttgctcacgggcgagcctcctgttggcgtgccgccaatacggcgggcgccgtccgatcgcagcgcagggcgttttgagggcggggggttgactcgtcgggggggaagtggtagcctcgtggcgtagtcctgctcctggccggcgccccgcaagcccggccttttttgtgcgcatgggggatcatgtcggcgcgacctccttccgttcggcagctcgcttcacaagcgcggcccgcacggcggcgagactgaagaggcgtcgccggccgacgcgtaggcacggcaatgctccccgatccgcctcggcctgcacccatgcaaccgggagccggaacacacgggcaacgccatgcacattcagtagttcatcgtgtttcgtcataccacgagcatagcaggagggatgtgcgctacctgtgcatgtacctgtgtaaaatttgagaagtgaagatttttttcggggctcgcgtctacctcttcgcaggcaactcccgtagacgatgcgttcctttgcctctgcccttgacaatcatggcgccccaggcccgatggtccctgaaaagatggtcgagtcgctttgtgtcgcactccgccgcttcaagcagggtggcgtcaccgacgtcgggacacttcctctcccatgactcccacaacaccttcacgcaagcagcctgactgggcgtgaacgtgtaggtctgtccataccaatataccgagcgaaagtcgggtgagtgcgtcgccgaacaagtggttttcggcgccgcctcgccggcccgctccagccatctctccaactcggcaaacacacgatccgtgctcagatggtcccaagccgctggacacagcgtgcgtaccccgctcctgtactcacctgccagccaagtgactacctcatccatctccaggttggccccccattcttttcggcagccgtgcaggaaatggaccagcatccccggtgacttcgcgtgcgtggcgagtttcgcataagctccctcgaccgccggcccgtcgtttctcgcccgcgccgcccgcaagtccttcaacagatccacgagtctgcgatggtagtccacgttaccccctccaggaaaaaaacgcccgggctgatgtcgccgatagtcgcgaggccagcctttcggcctggccgacccgggcagcgataattgcggcaactggtgtgactatccgttccatcgccggccagtatggggtaacaccggcggttcgtcaagtggtgtgagcggtgtaaccaaggcaggagcccgcgcgaaacgctttagtaaattacccgtctatgacggcactgggcagtgcgttggcctgggcgatcatctccaaaaacatggccttcgtcgcctgcgcctgagcgatggccttgtcgcaggcctcgatgctgtcgaggacgggcgggccgggggtggcggacacggccaggtcgttcctctcgcagaccccatacttcgcggaggccacgagcttgacaatgtgatgttccagttttccttcgagtccgccgcgcaaaacgcggacttcgaggatgtcgttcacgcgatccacggcctcggcgaacaccgggcttctcgccgacagttgcgcaatatacgcgctggggatgttgtgttcgcagcaaaactccttgaggaagaggacgttggggtcctgggcccattccagtaaatcccgagccagttgctccaggacttcgggcgtccatttccagggtccgagaggcgccatcagaagccctccggccagccgcccgtcaggatgccgttcgggtacttcttgcggatctcgacccgccattcgttgtaggcctcaagcaccttctccatatcgagcccccgcttgcgtccccacttgaccaaggccttgtacaactcctggccgtcgtgcagttggcccgccagtcgcaactgacacagaagaaaaaactcctccatcgggagcttgttggcgccccacgtttccttggccttggacgatttcttggctccggacgtttttttggccttggccttggacgttttcttggtcataaccgatctcctccctctcaattcgcgcctccatgcagcagcgacatcacgtggtccacggggcgcatggcggcgttcatgtcggtcgcgtgcggccggaccagctcctccatctccatccggtacttccatcgttcgatcagcgccttcacgcgcgccgccggcagccgttccaacaaaccgtcatggtcaaacatcatcgcctaacatccctcagggctcgctgtcgaaaactccgggcctccacgtgccggcccgccgcttgcgcgcgacgtccgcgacaacctggtccagtgtgccggacctgaactcatccgagtcatcgagatccgtcacactcagtccgcgtgggccgctgtcggtggggacggccttctccttggcccggtgtctcgccgccacctccgcgtaggccttccgcatcagccgaagaccctcgaccggcgtgtgcgggctgtccgtctcgcagttcgcgaccatgtcatcggccaaggcttccgcctcccggcgaaactgggccccgaactcctcgtcacaggcgtccaaaatctcggccaccacgccttcgttcctgcggttcatgttgttctcctattcacgggctctccctattgtaccaccaaacaccaccctaacaacccccacacctgcaccctctcttcctctgccccacccaggtccgccgggggtcttttttttgccaattttcgcgtccacatccgccccatcatgggcgagggcgcggcgcttgtgcacgcaggcgggggggtcgcgatgggcgaagtgtgtcggagggaaaagtttttcgatttgggacttatcgggggccggattcgtgacgataaggaagacggaggcgggctgagggaatgtacttttgcggcgttcagtgcgaatggtttcggctttggtgcgatattcccggagctgaagacacgtgcgggcgttgccattttcacggccagactcatggccgccgacaggccggaagactggccgcagattggcagacaccccacggggacggagtgcggtcggagtgccgatcccgtggggaccattgaaatgagggcgagatgacagcgaattacaatctgttggacgaacactggattccggttctctatcgcgatgggaggtacgaccgcgtcggaattcgtaatgccctggaagaggccggtcaaatcaggcaaatcgcggccagcaacccgatggacaacgtggccctgctgcggttcctcctggcggtgctgatatggtgcaaaggcgaactgacagagaatgaccgcacactgctcgaaggtagagcggatgggattccgccagagtggctgaacaaactggccgagcataagaagaagttcaatctacttggcgatggcgagcggttctatcaggacaagaccattctcgccgagctattgaaagccaagcaaaaggaatgggacgaacagagaaagaaggcaggatcccagaaagctccgaaaaagccttatccgacatcgctggacgacaacgattttcgtcccatcggcgatttgctcgtcgagtttccaggagccgattcagtaaatcacacacgccatgtgctgcacggttcctatggattctgcccggcctgctgtgcaacgggtatcctccggttctcggtctgggcctcggccaatcgatattatccggcatccgtgaatccgggatcagcggtctatgcaatcgtcgctggcgacaatctggcgcagacgcttgccgcaagtcttccggacaacgcacaccaaacgtcggaaccgccctggttgtcggattcgccgccttccttgcccctcgaaacggcgacagttcttgcatggaggcctcgcaggttatggcttggtgacgctgctgagaagggggtgtgcgcgaactgtggcgatcatcgcggcctaatcaagacgtgacctgccctacggacggtgggcgcgggaaccgctaacggctaggctgcctcgtccataggggtcaacggtccggcttcataccgacgctcgtattcggccggactgagatagcccagggcactgtgacgtcgggtcggattatagaacatctcgatgtatttgaacacctccctgcgggcttgttcttccgtggcgtaatcgctgtcgatccactcggtcttgagggacccgaagaagctctccatcatcgcattgtcccacgggtcgcccttgcgtgacatgctcatcgtcagaccctcgcgtgtcaacaaatcgcggaacgcctgcgaggcgtactgaacgccgcggtccgagtgatggaccaggtcgtcttgcggacaacgccgacgcaacgccatctccaacgccgcacagaccagggacgcatcgatggtccggctcaggctccagcccacgatccgccgcgagaagcaatccaggaccaccgccaggtacagccagccctcgaccagacgaatatacgtgatatccgccagccacttctgattcggacgcgtggcggcgaagtcgcgttgcagccgattcgtcgcgatcggctcgtcgtgattcgagtcggtcgtcttgacgaaacgccgtttatgccggccacaaaggcccagatcgcccatcacgtgacgaacggtctcccggcagcaggcgacctggtggtcttcgatcaggtcgcggtgcacccgccggtaaccataggtcccgtgcgaatcgccgtgcgagcgttgggccgcccgggcaatctcctgccgccgctgcgccctcgccgagggcggacgccgacaccaggcataatagccgctccgcgagacctgcaagacccggcacaggaggttcagcggatagcagtcccgttgcgtgtggatccaggcgtacctcacagggactccttggcgaagtacgccgccgctttttttaagatttcgttctccagacgcagttgggccaattcccgccgggccgctttgagttcttcggccaacgggaccatctgccctttgggcggcaggtggccgttagcgcggaaggccttgacccagcaccgcagggcccagtcgctgacgcccagttgctgcgaggcctggtggtaggtggtcccgccctcgacgatgagcttggcggcctggagccggaactcctcactgtagcgtttcggtcgtgtactcttgtctgccatagatagttcctttcgtgtctatggcagcccagtctatcaagctcgccccgcgcccaccatccgtagggcaggtcaacgctcgcgtttgctgcgggctgggcaacacctctaacggaaagtcaggcgttcgccaaacgcgtggagcaacatctcaagaacctggggcataatgcaaaggattccaagacaaagaaggaggtgaaagccgcgtggatcatcctcaactgcagactggccgagttgcagaaggcatgcagtgacaaactgcgaggaacacttgacgcaggcttaccaagagaacaactcgcggaatcgatagcgaacgcccttgatgatgtcttgaagacaaacgagaagatgttccaggacctcgttaagaagccgaacaaaaaggaagaagcggcaatcggacaagaagacctccggcagaagaagttctggggatcggatccccagcttctggtgtcgaagaatgaggcgcttgcgcttccccgcttggaagccgatgccgaagcgcacgccaggttctggaggtcggcgtttcgtgccgccgcaggaaagcagggacgcaagcgcattgcgataggccccgtggtcaaccagtttgtgtatcaagacgcaacgacgctttccattcccgatacgtctgccgagtcacaggtgcgtctttcaggcgatgttggcgacgaattgctagacctgttgaagcagctcacaccgaatcataaacgcgagcatcctgaaatccgcgctgccttggcgttgctcgcaccagaaacagaagaccgaatccgcgccatcttggacaaaagcaatgtcgcgggcgatgacagggacttcctccgctcaacgttcaagccggtcgtacagaagatcattgcgtccactgctcgcggttcttcgtttcagcgccgcgtggcgatgaccgaggcgtacgccgaacttgagaagctcatcaacaagaagacaagagcaaggaagtcaggcgcgtgtcgcaagaagggagctacgctatgaccccgaccattgaattcatcaacagactggagaatctcaaagaaggcgatcgttctcgcctgcgttggctggcgggccagccgctggacaagacgctttcgggatttgatctgttcaccggcctgtggtggccgctgcgtgcgacaaatgcgcgaactccgcggcgtgaaatctcatggctcatcgccaagctgtattgtgcatcctcggttccgtatgttcggcctgaatcggatgttggggtatcactcccggcggtgcttggcagatgcgaaccgtgcgatccgccggattaccgcgcccgcaatacctttcgccggcgattcgacgccgtgatttgctcaagcctttctgacatcgaaccacgactacagtggggcttgcgcgaggttgccaaggcagttgcgggtcgtgtggtccacgcggagactgtgaccggcatcgactgggcgctgctgctcgacgacctgtcgctctgggacagggagttcaacatggacgacacatggcagaagagccggttgaatgctcaccaacggctcgctcgttgccgtgaaactcaccgcacgccgcaggacctgtgggcgtgcgagtacctgaacgcaactgttcaaccacaaggaggcgactatgctgattgaaatccacatgattcagaaccacagtccgtcgaacctcaaccgggacgatctgggtgcccccaagacgtgcatcttcggcggcgtcacccgcgcgcgcatttccagccaatgcctcaaacgaagcatccgacgcagcccggaattcgcagcggcactggagaaagacggcggggttcgcacgcgccgactgattgaggagattgcgaaagcggccggccgtgatggcaacgagcccaaagaagaacacctcaaagccgtccgggaagtcttcaaagagggcggtgtcggcctgaaggatgagaacacttttgacatcctcttcttcctgcctcgatcagccatcaaagaaatgggggtcgccgtgagcgccggtaacggtgatttaggtaagaagttcgccgaagtcatcggcaagttcgtcaagacgccggacatcgccttgtgcggacgcatgacggagtttgatgcgaagggcccgttcgaaggtctgaagggcaaatttaccgtcgaagctgcactgtccgcagcacacgccatctccactcacgcggtcgtaaacgaggtggattacttcacggcagcagacgacattcccggccaggacgcgggggcgggacacgtcagcgaggcgatgttcaattcggcctgcttctacaagcatttctgcatcgactgggagcagctgctcaagaatcttggcggcgatgtggagcttgccacgacgaccgtcaggtgcttcctcgaaggcgccgcaaaggcgaacccctctggaaagcaacacgcatacggcgcgttcaactaccctgacggcatcttggttgaggtcaaggccgagaccgccacccctgtaagttatgcaaatgcctttgccgacccggttccggagaagtctgtgcgaggtctgatcggcgagagcatcgcgcgccttggccagtatgcacatgatctcatcgacggctatgccctctcggctgaacgcttctggttttccccgagctcacgccatcgcctgacatggatcgacaaaagcaagagggagcctgagcaagagcagtccgttgtggacgagaagaaggaattcggaaagttcccggacttcgtgaccgctatcatggaggaggtcggcaaaagaagcacggcgccggcgggagggagactatgacagactctcggacgatcttcctgcgtttcgaaggcccgctccaggcgtggggtgatacatccaagtttgtgattcgtcgaagcatggactcgccgacgaaatcgggtgtgctggggctgatttgctgcgccatgggtttatcgcgaccgggggcgcgcgagaagcttccagccttgaacacgcttacgatgggtgtacggatcgaccggcccggcgctcgctggtgggactatcacaccgttggggcgggtattggcttgacgacagcggcaggtgggctcaagaccggtgcgcagggtacggtcatcaaacgactggaatatctggctgatgccagttttctggtcgctttgcagggcgatgcgatattgatcgccacggtcgcagaagcgttgcgatccccgaagtggccgttgtacctcggtcgcaagtcgtgtccaccgtccatgccggtattcgcccagccgcgcaaggatgagacatggaccaacccaatggcggtcgatggtgatatcgaggctgcgctccagataatgccgtggcatccgcgatatgccgacgatgccccgcgcgatcagcatgggaaacgctacgagaacattgagttgccctgcctgatcgagtggcgcagaagaaatgacaaggatacagctccgcctgacgccgaggtctggtacgacacacccttttcgttcgacccgccggtgcatcatccgcgattggtaagacgaggtcaggtcacggtcacggtcggcgatgcgctccagcagcatacgccgccaccacctcgtccccgcgcggactacaataacgaccagtacaagaagcatcgtgctgagcgtctacaatccgatcagggcctctgcgtcttctgcaagtcgccggccacgactgtccagcacgtgacctatcgccgcgccgggggcaatgaggcacaggaagacctgcggtctctctgccggctctgccacgatgccgtgaccatgatcgagtacggcatgggcatgggcctggaccggattgacccgtgcgacgtgcggtggcgcgatgacattctccggacccgcgccgacattatccgtttccgcagcgaggaaacccggcggcgagcactgcgcagtgctcccgagaagattcgccgcgaggctttggaagaagaggatatctgaatcatgtaccactcccacctgctcatcaatgttggtgacaaccctgaccgcccggattggagcatcacccggcgctggctgcgaaatctgtatcgagttcaccagcgcttgtgtatggcctttccgtcgaaggtcccggtgtcacataaggaacgccttgcagcgtactgcgcaccctacagcggcacaggactggaccatctgcgtaacttgcccggggagccggatacagcggacgtgcaccattcccgtagcgatcaggccggattcctcttccgcatcgattaccctgtcgatcacagccggggcgtccgacgacccctcatcatcgtccagtcggcggggaacgagccgccggattggcactatgccttcgggttgaatgaagatgccgtggatgatggcggacgcccgattggcaatgccggattcttgttggccgcgccaccacagaccagaaggatcaccatgagccttgagaatgacgatgtgtttgtaattggcagcccaaaggagaatcatcgaatcgctcccggcgatctggtgcgtttccgcctgcgcgccaatccaacgcggaaagtgcaggacggatcgccgaacggcagccgcaaacgcatttgcccgacgctggtcgatcacgccgactggttgaaaggcaagttgggagatgcggcggattccccggtctgtttggagaacttcgtcaccggttgggcttacggatggcgttcaaagcacgaaccgcagcccagccagcgcatgcagtggtggtccgtactgtttgaggggagcttccgggtaggtaatctgaaggtgctgaagcagttgctcgaatgcggaatcggtccagccaaggcgttcggtttcgggctcttgtccatcgcgccggtcaggtagagtttcccggtcgaatagccgatgggtgtaatgcggatggcgtatctgcccatcgaatcgcgatctttgctgtccagtacgaagggattctggaaatgacggatacgcagaagttttttcagacgctctgctctggcattggcccggccaagggactggggatgggtctgctaagcattgcccgcgcttaggagaacctatggctgatctgcacgaactgccgaagttcgaggaccgctggacgcacctctacctggagcgcggcggcctggacaaggacaaagaaggcctggtctttcgtcagggcgaaggacgaacgctcattccgatagaccagttgtccctggtcatgctggggccgggcacgtcgatcacccagcaagcagccaaggcgctggcggccaacaactgcctgatgtgcttcgtcggtgaggagggcgtcaagatgtacgccttcggcacgggaggaacgcacagcgcccaccgactgctccggcaggccgaattgtatgcctctccgcagcagcgggaactcgtcgcacgccggatgtacctgaagcgattcccgtctccagtctcggcggatgtgaccatccagcagctcagggggatggaaggggcgcgggtccgcaagacctacgagcaaatggcggcaacctgcggcgtgaagtgggaagggcgcgactacgatcagagcagttggtacaccgccgacccgctgaatcgggcgctgtcgtctgccaattcttgcctctacagcttgtgccacgccgcgattctgtccgccggttacagccccgccatcggcttcatccacacaggcaaggtgctgagcttcgtctacgatgtggccgacctgtacaagacggagatcacgattccgctggcgttccagaccgtatccggctccaaggacgacgttgaaagacgaacccgactggcctgtcgagacatgttcaaacaggccaagctgatacggcgtatcttgcctgatattgcggaggtgctcgatgctcgtgatgatgttggagaacgtgccgatgagcttgaggggcgagctatctcgctggctgatcgagcccaaggctggggttttccttggaagtccgacggccagaatacgggataagctgtggcagaacgccctgaagaagcgcaagggcggctacgtccttcagatatggtctgattccagcccgcagggctacagcttccggtccgaaggcgaatcgtctcgccaactgcaagacttcgagggcattgccttggtggcttacaaagacaagcgtaggccgagccaggtatcaacatcttgaggtctgcccagtcccggcatacaatgccgtggtattgtccccacgcacgtgggggtgaaccgatatggcaatacttcttttaatgcagacacagattgtccccacgcacgtgggggtgaaccggcactgcaagcgatgtacacacggcgactgctattgtccccacgcacgtgggggtgaaccgtccacgactgttattacccgcccgatccacagattgtccccacgcacgtgggggtgaaccgacggtttctctgcctgtgggtgctccgtatctattgtccccacgcacgtgggggtgaaccgcgtgctgagtgtgctggatgggagttttcggtcattgtccccacgcacgtgggggtgaaccggtgtgggccgggcggccataaggggagatttgattgtccccacgcacgtgggggtgaaccgctcagccagcttctccaagcaatcaccacaaaattctccccacgcacgtgggggtgaaccggtgatcccggccgacgagaacgtcgcacacggattgtccccacgcacgtgggggtgaaccgaccgccgccgccgtgctcccggcggcgagacattgtccccacgcacgtgggggtgaaccgccagatgaacatggactgggagggctccgcggattgtccccacgcacgtgggggtgaaccggggagttgttcgtatcctcgcacagccgcaattcgacttcccactcggcctgcgtaaagcccgtcactccattctgcatgtcctcgaacggcacgtcgacacacaggttgcctctggatgctgtgagggatgaggattccctcatccggggcaatttggccatctgatctccgtggggcagcatttgtcaagacaccccgcgtcgtaggggacccgtccaccatacgccgctgggcgtcagcccgcctccgggccaaacggacggaatcaccacaggtcccggaccaagtatcggggcttctgcgtcagctcgatctcggccgccaccttcgccttgaagtgctcatcgtactcatcggtccgcagatcgagcacccaggtgctcacaaacatcacgctggcgagcaggtcctggcagccttgttcgacttcgagttccaggtggtcgatgtgctctccctgcggcggggacgccacccctttcagcccgcccgccagcaggaatagatcccgcccttcccccacgagcggctggcggcgccctttggccgccatcaatgcctccgctctgtccttgtcgaaactgacctcacgcatgaagccaccatcctttcgccggcgtcctggcccgaccgccgcctgtgaatcctaccttgccttgcccttcgcagaaccaacccgccccgtgcgaaacataccgtaccgcatgggacccgctccacagaggcccacagagctcgccacgggccttctgggcgttccaattcacagagacggcccttgggtcgggtccgggccagatcgtggctaattccgtcgcgaatcgcacacgtattcgagttggggcgacgctgtgagtcgtctcgacggccgtgggcgtcttgcgccccgtcagtctgtaggcgaacaaggggcagcccgtgtcggtgcagtcccgaaccgcgttcgccacgtaagccatgcactccagacacaacgaccggatggcagcactttggctgcgtccggtcatggccagccggtagagcctctgaaaacgtcttggcacatctctgtccgtcatgctgttggatctccttcggccgttccgtcaaaaggggccgatgccccatgtccgtcgtctttgctgatgtcactggctctcgtcggcggcatcgccggcctgattccacatctcgggcggccggacgtaccactgggggcgtttccctccctggcgccggacccggctaatcatgcctgcttcgctcagctttcgaagatggcgtttgatggcctttgtgcgtagcatcccttgctccggtggtgcgcagagccgagccagcctcatgatcggcgcttcacacggttgtcttccgccgtccgtccattcacagagccagccaaacacccgcagtgccccgattccgacgcatcggctggcggcctcgcgccacgccggcggaatcagaagctccgcgcgtgggaaggcccccggtctttggtcgggttggcttctgctcgcggcagcgtcctcgtggggcttggacgggggctcgggtacaggcctgtccagcgcagggtttcgcctgattctcgtagggaagctcaaacgccagtcttggccgctcggcttgtacacatcttcccggcgcccgtagtagcccttccggtaggtcgtcacacgagcatcgaactccacgcagtccccctggtgcagcacgcccagggcccggaaccccttcgtctccgtgaaccagagatgatcggtcacacggacgcccccatccacagggcacacctcacgaaacaaaagcgtcttgaggggcgctcctcgataggcactcttctggccataccgctcgaagatggcacggaacctcattcgttgaccgtccagattcttccattcgtctcttggcatgttggctcctctctgaggcccgatctcgggccgttcgtcaaccacagcgattcacaaaccgtccgcgcattaccagatccgcaccgcaagagcgagagatagtactgtggggccgggggtgccgggggggctccccccggtggggtccgggccgcaatcgtgaagcccgttgccgggccgggaccgaaacacgacaaaacgtgttgtcttttcccgttgcctcctcgcgcgcccgggcgcgagacttcttggctccgagagccagggaacggcacatccccgggataccttcttactcgcccgtcagtgcctccgccgccatccatgccccgagcatcatcctgctttcctcgtccagctccgcagcgccctgcttggccgcctccatcagggcctcgtggtacttgtcgagcacagcattgagcaagtccgggtcgccgtggtcgccgtccgacagggcccaggacaggctcacggccagcatcgtctccagcggccgctgctccagccacgtcgcgatcaggtctttcggctgcctctgcggggtcatcgtgtctcgttcactttccatcgctcagcctccgtcaaaaggggttccgcgccgccggctgctcgcacgagaggcccggccggcacagggttacgttctatgcaggcgcctcaggggtcggcctgtggctcctgaccaggtgcaggatcttccgcttcacatcctccggcaggtccggccaggccgccacgatctgagccaagtcggggtcacccgacgcaatctcgcgcaccaaatgcgcacctattctgtgttcgggagtatcatttcgctgttcgggaagtgcaagagtctgtccctcgaaatccccttcaaatggctttcggtcgcattctgtgcaggaattggagcggtcctgtggtgattctgttaccccacgaatcgggttcaaatcctgtctccccgatttcccctcttgttctgccgcttgccgcattcgatctcgtcgcaggggccagcggcagcttgccgatgggtcccacgtccaagtactcagaccagagccgtttatggaacttgcctcggccctggggcgacggtatagttagaggtcctcgcggctgctccgtgggagctatgtatgtaagtgggctcgccgcgcgggccgtgagagtgcggcgccgcctgggcgcgttggaacatggatgggaagaagggttctgggcaaggaaagctgtggtagattcgggtgcggcaagtctggactacgagcaatttgaagaacgcggattgcgtcttgtcctaaaggggacgttgaacgccgccgacgcacagcggttctggccccaggttatgcagaaggtggcgcagtgtgacccttccgccatcgaagtcgatgccggaggtgtggaaagcttggatacggcgggcatggcccttctgctcgaattgaaggctggacaggagcagcggcagcgaggttttcggattcagggcctgcgggacgatctgaccgaactgatgaggcggttcgatccgggcccgcccgcgccgcctaagccagcgccgccgtggctggtccgcgcgatccatcgtgtcggtgagatctcgcatggatcccttgtgggctttcacacgcaggtcgctttcctgggggagattttcgtccgcctgctgagtgttctggttcgcccgcgtcgtctgcgctgggccgatacattcctgatcgccgagaaggcgggagccaatgcggtcggaatcgtcgcattgatgggttttctgatcgggctgatcctggcctttcagtcggccatcggtatgcgcaagttcggcgccgagatctacgtggccgacctcgttgtgctggtgctgtttcgcgagctgggacctttaatcactgcgttcatcctgaccagccgcagcggatcagcctttgcggccgaattgggcacgatgaaggtcaacgaggaggtcgatgcgctggtgacgatgggcgtggaccccgttcagttcctggccttgccccggctggttgccgcgatctgcgtgatgccgctgctgacactgttcaacgagctgttcggtctgatcggctgcgggctggtcatgcgatcgttcggtttccctgtggcggcttacatcgaccagattcaggaggccgccagcctgggcgacctgttcggcgggctggtcaagacctttgtattcggcgctctgatcgccggcattgggtgtctgcgcggtttgcagacgggcaacagccccagcgccgtcggcgattcggcgacccgcgccgtcgtcagcggcatcgtcgccatcgtggttgctgacggcgtgttcgccgtgctgtactactacttgggggtatgacgatggggtccgacgcaccgccgatcattcaggtcagcgacgtgaccgtgggctacgatcatcacatcgtcctgaaggacgtgaccttcgaggtgggcgccggcgaggtcttctgtatcctgggcggttccggctgcggcaagagcacgctgctcaagcacatgatcggactgcatcggccgctgacggggcgcatcctcatcgacgggaccgatatcgtcaccgccgaaggcgaggagcggcgtgcgctgctgggccggatcggtgtggcgtaccagaacggcgcgctgttcggctccatgagcctgatcgagaacatctgcctggtcctggaagagttcacgagcctgccgcgacaggccatgcagacgatcgcccggatgaagatgaaggtggtcgggcttcaggacgccggcgatcgactgccctccgaactcagcggcggcatgcgcaagagggcggccattgcgcgggcgctggccctggacccgaagattctgtttctggacgaaccttcggccggactggacccgatcactgcggcgcagctcgacgacctgattgtcgaactgtcgcagaccctgaagatcacgttcgttatcgtgacgcatgagctggcgagcatcttcgcggtcgccgaccatgtaatcatgctcgacaaggaacggcagacgatcgttgccaggggctcgcccgaagagcttcgtgaccgcagcgacgatccgtgggtgcggcagttcttccatcgagagtcgtcggctgcaggaatcaggaggtaggcatgtttggaaccggtcaacagagagattgggacggatcggcctgatgggaaggaaaccaagctacttcaagatcggcgtctttgtgattctcgcaacggccttgctgctgacggccgtgatcctgttcggttccggcgtgtttgcgaaggacaagctgagattcgagacctatttcgacgagtccatcacagggctgacggtcgggtcaccggtagagtttcgtggtgtgcgcatcggtcaggtcgagaccatcacattcgccggcagtgtgtatgcgatcccgccggacagcggacgattgtccgtcttccagcctatcgtccgcgtcgtctacgcggtgccgcgagagacgatgcccgaactcggcgtcgaaaaggccggtgccatgcttcaaaagatgattgctcgcggcctgcgcgttcgcgtcaattcgaatatcctgacgggccagggctacctggaggccgactatctcgatccgaatcgcttcccgatcctcgaggtgccgtggacgccggtgtacacctacatgccgtcggcgcccagtgagatcacgacgttgaaagactcgctcgaaaagattttcacccggctggaggagattgatttcgaagggctggtggattctttcgagcggaccctggtggccgccgagagggcggtgggggatgcgaatctggcccggatcagcgaggaagccacgagcctgctggcggaaacacgggagaaggtccaggccctcgacgtagcgggcatcaacgacgcgacgcagcgtttgctggcctcgctggagcggaccgtcgcggatgccaacgtgccggaactgagcgccgaactgacgcggtttgttcaggaaatccgcatcacgaacgacggccttcggcgtctgctggcgtcgccgacggggaccgcgggcgggtccaaccttccggaggttgtcgcgcggctgaaccgggtgctgtcgagcatcgaccggctggtgacgaccgagaaaccagagattgaaatcatcatcggcaatttccgggagatttccgacaatctgcgcgacctgaccgacagtctcagggagcgtccttcggagctgatcttcagcaaacccccacgtgaatcggaggcatacaaatgatatgtaaggggacccggccggccctgtttctggccctgaccatgttcgcgcttgtcctgacgggttgcgcgaggccgcagtcggccaacagccgcttctacttgcttcagacgtctcgctcgttgtccccggccgttcgcgaaggcaaggctgttctggcggttccacggttcaccatcgatgcggcgtacgccggcagggggctggtctaccggctcgacgaacatcgatacgaatccgacgcttacaacgagtttcttgtttcaccgaccgtgatgatcacggagaggacacgcgactggttgacccagtcgggtctgttcgcgcaggttctcggctcgggcagcggcgccgagcccacgcatcgaatcgaagccaatattgccgctctctacggtgactttcgcgacaggcgcgcgccgaaggcggtcatggagattcgtttcttcctgctgcggaccgaaagcggcgtagacccggagatcatcctggccaagtcctacgccgcgacggccgacgtggcgaccgccgggccggaagggctggtcgccggtctcgaccgctgccttcagacgatcctgacccagttggagaacgatttggccggtgccgtctgacgctgaaccgttcgaatcagagtcgcacgatctgacaggcgatgtcacttcgcaccaccggcacggcgacactcaatcggtcctggtcgtgtcgaacgcggtgcgtcttgatgcaagtgccctgacttgtatcccaccactgaacggcgtactcgcccggcgaaaagtctgggatttcgagggtcgcaccttcgatctcttgaggtgtctgccccgcgacgaccttccaccacgtggcgtcccggctggacagccacagataggtgcgatccgttccctgatagcccagcacgcgtagacgcgcgtcggacacagttgcgcctgtcgctctcaatccctcgaaggagatgtcccgcaggtatgccgccagcggccgatagtgacggtaggcgtcctgctggtccaattgctcccaccaccagaacatggccgtgcccgacggtccggcgaaggtcgacgcccagagagcattatggaagtgcacgccatcggtgtcttgtctcatgtgctcgctcaggccccacttgtcggtggccaggccgaactcgccgatcagcgccggtttgttcggcgcgtgctctcgcagaaaggccgccttttcgaggatggcctggacttcgtctttgaagtctgcttcgccagggcgcaagtagtggtgcagttgggcgacgtcgagggctgcgaggccacagtcgcgcgccgacggatgccatgtgctggtggtccgcaggtggcggtagatgtcgatttcgtcgaggtagccgcccacctcctcatagaagtggtccgttggcttgcccgggtcgatctcgttgaagtactcccacgcgccgacgctggtcgagtagccccaccgggcgacggcatagcgcatgaactttctggcatccgcgatggctcggtcgtaaggcacattgttcggattgccaagctcattcatgtaaagatcccgcgtcagcaggcaaagcatcagatagatgccgtgtttctcggcggcctggacgatctgatcgaccatgaagcagtcgagcggattgtagtaaccccgcacgggacgattgacatccgcttcccatagcagctccgcgctgtcgtcgctttccttcagcgacagaccggtcagccacgcagtgccttcgcccgaaagtgcaactgtggtgtggcccagccagtactcatcggggccggtggtgaattcttctgcgaagtcctgccaggtggcggtgtgtgccggcacccgccaatcgtgtctgccgacctggattcgcaaaccgtccgctccgtcggccttgaaccttccgcggagtgtgtaccgcgtgtccggccgcagcgccacccggtgcgagggcgaaacctcgatcgaagcgccgtcctggccctgcagttgtacgcacttgccctcggcttcaggcaggggaaccacgggcgattgccggttccatgaacgggtccacgcgctcttgggagcctcgacggcgagggcccagtcatggcaacacgtccaaatgcgcgcgaagttcgcgccgtttcgcgccatctccgcgaagatcgcctcggccttcgggacgttgacatactggctctcgccgatgaaggcgaggttctggccgatggcgaagaagggctggccttcggcgaattcgagaaacctcgggtcctcgcggccgacgcgcaaaaatcccttatttgtggaagggacgcactcgatccggatggtctgcgacagcgattggccctcacggtcgttcaggcgagcccggatcgtgtatgtccccgtctccgtgggtgcgaaccgtgctttccacgtcccttgaccgatcgggtagcaccaggccacggttttgccatcgctggggaaatctcgccgttggtaatcctggccgaaaaaggccggcagaacgagcgcccgcccgctcgggcaatcgatcagcagatcgatcgcaacctcacatgggtcgaagggattgtcgtacgtccgctccggcgtcagtgtcagttcgagcttgtcatacttgccgacatgggccggacaaggcccgatggcgaccagccgcggtgcggcaaggaggctgccggacgccgccagacagcccgcgaacacgtgggtaaaaaccatcctgcatcgcatgcgatgttctccttatgacctgaccattcacgaggcacagcctaccatgccgcgtccgtgcgaggaagcgcccttgcatttgcccggcgaaggccgcatactcagcgtgcggggttcggaggggatggcacgcaggcggcaagccccgattggggcgacggaggtttgcactatggcagatcgattgacaacgcggcggacgtttcttgcggatgcggttctggcgacaggggcgatcgcactttcgccggctcaagttcgtccggcggcgggctccgagggtgagcggatgcacgtcgcctgcaactcgtactcctggaccgtgttctatcagcgtcaagggcgcaatttcgaccagtcgctcgatgaaggtctggccgaggtggctgccagcggtcttgacgggtttgagccgtcgttcggcgacgtcgcacaggtcgagcgtctggcgcctctgctgaagaagcaccgcctcgggatgcggtctttttacgtcaacagcctgctgcatgaggccggccgggccgatgagagcatccggcagatcctcacgattgctccgagggcccgggacgctggagcgcggatcgtcgtgaccaaccccaatccgctcgcctggggcggcgcgcaggacaagaacgacgaacagctcaaggtccaggcggccgcactgaaccggctcggggccgaactgcggaagctcggcctgacgctggcctaccacaatcacaacatggaactgcggcaggccgcacgcgagttccaccacatgatgctcggcaccgatccggccgatgtgacactctgcctcgacgcccactgggtctatcgcggcgcgggcaactcgcaggtcgccctgttcgacatcgtcaagctctacggcaagcgcatccgcgagctgcacctgcggcagtcccagggcggcgtctggaccgagacatttggcgagggcgatatcgattaccgcgccctggccgatgccctgcgccaggagggcgttcgcccgcacatcgtcctggaacaggcgatcgaaaacggctcgcccaacaccatgccgcccctggaagcgttcaccagaagcaccgagtacgtccgccggctctttgcgggcctgggcgaaaaagcttgaacccagacgcacgttccgataaaatggccgcagtgaatcaaggttcgaaggccggccggaattgaccatcatatccgtgcttgtcgctatcatattattgtcgcatatcatcgcaccggcaccttcggagaccttgcggagatagctcagcgtggcttgagggattttcggggcacgggcggcggttccacaaactatggcggcgaacgatgattcgcccgcactatcagccaaaggtacgccccctgtctggtcgaagagaaggcaggtgctggatttacggttattatccattcattcatcccaatctaaggagcggcacaatggcacggagaatcaggtttgcagggtttctggtcctggggctggtggcggcagtcgcccgggcggggaccgtcgatgtgatgatggtcgtccccaagacgttgtacagtggcgcctcgacctcggcgacgatcacggtggtcagcgcacgccagtcgtcggcagggatcggcgtgagtctgcgcctcaaggcccatgaagggaacgtagacctcgccgccgggcagaccgatgaggcagggcggttcgtcgcccgattcgacacgcccaacttggcggatggctcctatatcctggaggcacacgtcgatggcgccgaggagactctgacaactcagatcatgatccggcggatgcccgtggtgttgatcgaaacggacaagccaatctacaagccgggccagacgatccagggccgcgtgctggtgctgacgaacgagcttcgtccgagcgcctccgacgtgaccgtgcagatcaccgacggcaagggcgtcaaaatcttccgcaaggacctcacgacgaacgccttcggtgtcgcgccgttcaacctcgatctggccagcgagctgaactacggcacgtggaagatcaccgccgaatcgggggccggccggggaaccatcgacctgcgagtcgaggagtacgtgctgccgcgattcgaggtcaagctcgacacgccacgggattacttccgcaccgacgagagaatccccgggaccgtcacggcgacgtatttcttcggcaagcccgtcgacggcgaggttcagatcagcgccagtcgctacgtcggtgtctgggaggaatacgctcgctacacggcgccgctgacggaagggcgggcggagttctcgctgcccgaggtcaagtacgtcagcgggaccacgggagccggcggtgcgggcagcgtgcagctcgacgtgaccgtcaccgacacgtcggatcaccaggagaagacgaccaagctgctgaagatcgtctcgtcgggaatcgagcaccggctgatcgcctcgtctcggtcgttcacgcccgcgcaatcgtatgacgttttggtggtggccgagacgcccgacggtgtgcccgtctccgtgacaggacagttgatcggcgagtactacgccgaatcgggtgagatgatctccaaggaggcccattcgctggcgttcgaaggctcgacctcgatcaccctgagggcgccgcagaaggcttcctgggccacactgaagagcgaggttcgaggcgatggcgaaagcgggcaggcggagttgtacgtctatgcgacatactcgcccagcgacagcttccttcatctgagtcgcgaatccaccggcgccgtcggcatgggtgacacagtcacgatcgatgtgtttcgcacgcacgatgcaaccatctactacgatgtctttgcgaacggccataccgtctggtcggacgcggtgaccggctcggcgatccggttccaggcgacgcagcagatggtgccggccgcccgggtggtggcgtacgtgatcaacccgaacaacgagatttccgccgccacgatcgagttcgaggtgacgatggaccacgcagccagcctggccctgggagtcagtgccgaagaggtcgggccgggtgagccggttcgcgtctcggttcgttcggagggtcagtcgatggtcggcctggccatcgtcgacgagtcggtctatgcgctgaacgaaggccggctcaacatgcaggaggtgttcggcgagctggaacagcggttcatggagccgcaggcggaaacgcacgaccagccgtacagctatggcgcccgcaacatatttgaggacgccgggcttgccgtggtgacttcgcgcgggctggatgttcccgagggccggcgaatcaacgggctgtggtggattggtccggtcgtccgaaggggtggcgccgacgatgttgccgagaacgccggcaaaggagatgggttggcggaggtcgatcgggtccgccagttcttccctgagacgtgggtgtggatgccggatctgctcaccgagcccaatgggaccgcgatgctggacctgacggcgccggacagcatcacgacgtggcggcttcatgcggtgtccacgagcgacaacgggcttggcgtgacggagtcgtcagtccgcgtgttccaggagttctttggcgagcccgatctgccgtatgcggtgacgcggggcgagcaattcccggtccgggtccaggtgttcaactacctcgacgaacctcaggtggtctatgtggagatggcggacgccgactggttcaacctgctcgacatcagcgaacagcaggtgcaggtaaatgcaaattccgtgtcgtctgtttcgtttgtcattgagccgacgaagctcggacatcatccgctggaggtccgtctgcgttcggtccggcgggccgatgccgtgcgcaaggaagtgctcgtggagccggaaggcacccggcgtgagctggtcaccaacggcgcgatccgagcgggcgagacggtggtcctcgacgcgaatacgccggaattcgccgtgcccgattcgcagaagattctcctgagcatcacgcccagcctggttgcccagagcatcaacggtgtggatgacctgctcggaatgccctacggctgcggcgagcagaacatgatcttcttcgccccggacgtggagattctgcgctatctcaacgcgaccggccagctcacgcccgaggtgcgggccaaggccgagcacttcatcacggtgggctaccagcgagaactgacattccgccatcaggacggttcgttctccgccttcggccagagcgatgccgagggcagcctctggctgacggcattcgtgctcggcacgttcagcgccgcgcgtgaggtgacgacgatcgacgagacgattctggccgaggcggccgcgtggatcgcctcgcaccaggcatccgacggatcgtggccgccggtggggttcgtatgccacagtgaaatggtcggcggggtgcaggggacgtacgcgctgaccgcgttcgtgtcgattgcgatggcggattacggtatggccgatccgcacgtgcagggagcggcgacgcaatatctgcgtgacaacctcgcgtcggtccgggacgatgcgtatgccctagcaattgcggcgctggccttcgcgcgggtaggtgatccggccgccgacgcggcgctcgaacggctgctggcgatcgccgtcaccgatgccgacggtctgcactggcaacctcacccggtggagacaaccgcctacgcggcgctggcgatgatcgagaaggaatggccgcaggcgaacgaagcggtcaagtggctttcgctccagcgtaacagcctgggcggctacggcagtacgcaggatacggtcatggggctgaaggccctgatgatggcggcccgcagtcagagccgcaacgtggaccttacggtgaccgccaaggcgcggggcggggaaacgctggcgcagttcaccgtgaacagcaccaacttcgacgtccttcagacggcggagctgccgctcgaatcggccgtcgaaatcagcgctgtcggctcggggcaggtgcgattccaactggttcgacggttcaacgttctgctgcgtgacgatccggtccagaaggacatgaccctggaggtgatgtacgacgccgaccacgtggaggtcgatgatatcgtcaacgtcaccgcgacggtgcggtacctcgggccaaaggactcgacaggaatgatgatcgtggatgtcggtgtgcctacaggcttcgccgctgtcgccgagtcgctcgatgcgctgcttgccgacaatctcgtcacgcggtacgaggtggccggacgcaaggtgatcttctatctcgacggcctggaacgcggcgaacaacggaccctgcacttccaagtcaaggcccgcttcccggtgcgcgcgacaattcccgacagccaggcatactcctactacgaaccacaggtgcgtgccgaggctggcggcaatgagatcaccatcgagccggccccgcagcagtaagcgaggaccgtggcgtcaagtccaggcgtactgctgcgggttgctcgcggccctacccggcccgatgccgggcggacaatatcgcatcgcccctcatgtgccgagctttagagcgttcggcgtcggcgcagccagctcaccgcactgacaccgatgccggccaagagcagggctcccggcgccggaattggtggcgtcgtgctgcagatcttcgcccagagcgggagcggaggacaggtggtacggcattcttccgtgctaagcgacgagatgatgctgctggggcaactgccgaaacccagcacgcacaactcgtagtccgcgcccccgacctcaaacgcgatgggatcgaacgacgtcggcagcgtgatgacatccgcaggatggccacccgggccgaccgtttccgtaacgcccagcgtcagggacgtgttgaccggcgtcccctcaaagtccatcgccaggtccagatcgaccgccgtgatgccggtgccgacgactatgggcgtattgtaatggcgcagcgcgcccacgacaaagggcgtatcgagcaccacgtcggtgggcgtcgcgacgggtgtgaagcccaagctgctcttgagaccaaacagataggccggagtgccccaggatatgagctgttcgcccatcaaagaagaccagtaggcaggggcaggggccaaggactgaagtacaggatcgctccaggtgccgctggcgctggaaagcgtcagcgcaccactggcggtgccgacgacggcgagcagcgccagcgccggcagtattgcaggtaaccgtctcatcttgtgtctccttacactccgtgtgtgactctgtggaaaccgtcagcttaccttgtatccgtggaacccccaggcacctcctttctccgggtttctcccacccatccgtacatctcccctttactccgtccggacaaacctcgcccgcacggattttactcatccagacactctctatgtccacatagcgtctgcgtgtagctattccgcgtgagcagaaccacacgtgtattcatcaccgccccatccgggttaaatatacgcgcaatatgggacgccctgcaagcaattccacggaggaaaatgcttattttgatgtgggaagattgggggacatgggaagactgtcggtgacattggtttcttttcgagattccgtgtcccatcggatgatgaggcgccgcacaggatcgggtcagcgtcgggtggaccagcgggccgaccggctggccgatccggactcacagaggttgccgaccacggcgcgcacggtgttgcggagaattgagagaaacccagcgacttacgactgcatcgacgcgagcacgtcttcgagtgacaatgcggcgcagcagaccgttgtgtcggaggcgccatagtagaccttcaaagtcgtctgttcgacgagcaggccgcaggtgaagaccacggggccgaagaagccggagcactcgtattcggtctgcggctcgagaatcggccgcgctgagcgggcccgcaccatccagggctggcgggcgtcgagcaggacggcgccgaggcagtaacgatggttgcggtcggcgccgtggtaaatctccagccacccctcgtcgaggcggacgggcggtgcgccggccccgatgcgggcctcgtcccagaatccgtcgcgcagccccatcaagtggcgatggcggccccagcagagcaaatcgggcgattcggcgatccacatgttgttggtgtgacaaagcggcgagtgcggccgatgcaatgcgtagtatcgtccgtcgaccgtctcggggaagaggacgacgtccttgttttccgggccgaagataacgccgtgacgttcgaaggtcgcgaaatcacacgtcgacgccagcgccgtggtcacccccagcggcgagaccgcgacgtagctgatgtaatacgtctggccgatccgcgtgatgcgcgggtcctcgacaccgaagctctcccaggggtcggccggaccaagggtgggatgctcatcgatggtgaagcggataccgtctttgcttctcgccacgcgcagatgcgatattgaggtcaggtatgtcctgccccggcgcacgatcaaccgaggatcggagaaatcgttggccgggtcgggtcgagtgaacgccttggtgacgatccggccgcaggccgggtcgagaaacgcggtctgcaccacctccgggtcagtctggatcggacgctcggctacgcgcaccagcaggacgatttcctcgccaaggcgggccaccgcgggattgaagacgccgaggacctcgaaatcgccacgcgacggcgttacgtcctgtggggtgaggatcggattggctggatcgcgaaatgctgccatggcgacattctcccgaactctgtcggcggccttggcgtcaaggccacgattgcatagcgaatcgtaaccggtcggatcgtatccggcaaggcgtcggctcgatctcgacgaggtcggcggtgtagacttggcggcccggcggggcaaataacgttgattttcaggccgcgaatggtagaatacagtctgatgcgcatgtgcgaatatgccttcacggcgggcggagtcgcgaggtcattggggatcgacgacggtcccggattctggaacaccagcgtacttgcacgcctgtcaccgcttggattgtcgggagtgaggaatgagtgtgacgcgtgaatcccgtcgggccgctcgtcttgtgctggcttcgtttcttctgagtgtcggtcctgtctcggcgaccccggcaggccggggggcgggtctgccgctggcgatcaatgagctgatggcggccaacagcagtgtcaaggccgacccccaaggccagtacgacgactgggtcgagatccataattacagcgatgcgccgatcgacctggcccgcatgtacctgacggacgatccgggcgaaccgacaaaatggcagttcccaggcggtgcctcgcagccggccaccgttccggcggggggatatctcatcgtctggctcgacggccccacaagcgacagcgggctgcatgcgtcgtttgcgctcgattccgacggggacaccctggcactgtttgcccccgatgggaccacgctcatcgacagcgttgcattcgaagaacagaggaccgacatctcctatggccgctcgcccgacggcaccgggccgtacggcttcctgctgacgcccacgcccggctcgcgcaacagcggcctgtacgacggtctcgtcgccgatacgaagttcagccatgaccgcggtttctacgatatgccgtttgacgtgacgatcacgtgcgagacgcccggcgcgaccatctactacaccctcgacggcagcgcgccgtattcgcaggctcggcaggttcctgccggcagtgtctacaacggcccgatccggatcaccaggaccacgtgcctgcgggcccaggcggtcaagccgcagtgcgtacccagcaacgcggacacgcacacgtacatcttcctggccgatgcggcgaggcgctcgcagtccgaggtgctggcacgtggctatccgagcacgtggttcggctcctacccggccgactacgagatggaccccgagatctacaacagccccgcatatgccgacgtcatggacgatgcgctgctggcgattccgacgttgtctctggtgaccgacagggaccatttgttcagcaagaccaatgatgcgcagaccggcggcatctacatctacaccgggcacagcagcacgggcggccaggattgggaacggcccgtgtccgccgagctgttcagcatcgacggcgccaaggaatttcagatcgactgcggcctgcgcatccagggcggcgaaagccgcaacccgcccaagtgtcccaagcacagtttcagcctccgctttcgcgacgtctacggctcgtcgaagctccggttcccgttgttcgacggcagccccgtggaaacgttcgattcgcttcaactgcgcggcttctttaacaacgcctggacgcactgggatcccggccagcgccagcgggcgcagtacattcgcgaccagtggatgcgcgactcgttgctcgagatggggcaggccgacgccggacgcgggttctacgtgcacttgtacctcaacgggatttactggggcctgtatctggtccaggagcggccggtcgcctcgcactacgccgcctacaacggaggcgacccggatcgactcgattcgattaacggaggacgcgacgcccacgacgtcaccccccagacctggcaacaggccaggagcatcgccgccggcggcgattgggcccggatctgccaggtcatcgacatcgacaacttcatcgacttcacgctcctgaacctgttcgccggcaaccaggatctcaagaccgacggaaactggcgcgccgccggaggcggcgccgacaacaagccctggcgcttctatagctgggacggcgaacgagttcttgagaaggcgaccgagaccgtgataagggatacgttggacccgaccggcctgtatcgccccctttcgcaaatcgaggaattccgcgttcgcttcggtgatcgcgtgcacaagcatctgttcaacggcggcgccctgacgaccgagcgcaacatcgcgcgatggacccgacgggccgacgagatcgacgccgctgtcatcgccgagtcggcccgctggggcgactatcgccgggatgtgcattcctacagttcgggcccctattacctgtacacccgcaacgatttctggatcgtggaacgtcagaatctgctcgacaactatttccctcgccgcaacgaggtggcactgtcgcagttcaaagccctggggctctacccgagcgtggaggcgccggtcttccatatcgacggtgtctatcagcacggcggccacatcgccgagggctcacggctcacaatgacttccaacgccgcaacggtctggtacacgctcgacggcagcgatccgcggcgccccggcgtcagcggcagcacgggcgctgagctggtcctcgtgccggaagcggcggccaagcgcgcgttcgtccccaccacggatatcggcagcgcctggcgcagcgaggtggatttcgacgattccgcctggatcgccggctccggcggcgtcggctacgaacgcagcaccggctacgaggcgttcttcgacatcgacgtccaggcccagatgtacaaccgcaacgagagctgctacatccgcattccgttcgacgtcacacccgaggggttgcaatacgccggcggcctgacgctcaaggcgcggtacgacgacggtttcatcgcttacctcaacggcgtcgaagtccagcgcgtcatgttcgaggggacgcccgcctggaactccggcgccaccgacaaccactccgacctcgacgcggtcgagttcgagcggttcgacctctccggccatatcagccggcttcgcctgggacgcaacctcctggcgatccaggggctcaacgcaggtgccaacagttccgacttcctgatctcggttgagctggtcgcgtcgcaggggggcgcggacgttccagccggtgtcgcgccgacggcggtccgctacgccggcccgatccggctcgatgccagcgcgatggtccgcgcccgtgcccagagcggcagcacctggagcgcgctgaacgaggcggtctacgccgtcggtccggtggccgagagcctgcggatcagcgagatcatgtatcatcctgtcgatccgaacaccgaatacgtcgagttgctcaacatcggctctcagccggttaatctccatctggtgcgcttcacgaatgggatcgacttcaccttcggcgacgtcactctcgacccgggtgcatatgccctcgttgtcaaagacatcggggcgttcgaggcgcggtatggggaccagtcgcccgtcgtcggccagtacgccggcagcctgaacaatgcgggggaaagcatcgagttgcaggatgccgccggccagatgatcctcgccttccggtacaaggacggatggtacgacctcaccgatggggctggctactcgctgacggtgattgaccccctgaccgccgattcggccaccctcgacaagaagggcgcctggcgtgccagcgccgaggtcggcggctcgcccggctacaatgactgaacagagactcgaaacacgaaatccgaaacaagcccgaaatccgcaagctaaaatgaacgaaatgctgacgctgtgccgaaccccgtttcgaattcgcagtttggtgccttcggatctatttcggatttcgtgtttcggatttcggatttaacgcaacgccgtcacttcttcggataggcgtagtaaaacgtctcggcacgggagaaggcctcgacgtgcccgtcgaggaacgcgcagttgccgcgtccgcccagcttgtcgcccgaaggggcgtggtggaaacccgcgatcacatcccagaattgcccgaccccctcgggacccgggatgatgcgacgcaggtcgcctccggtctggctgaaccaactcttgaccatcgtatcgctgccgggggccatgaacgtgtcattgagcccggacatgttgtaggccgtatcgacgatcgcgctctcctctgcgaacgaaaacgtcgtcgcaggatgcttgacgtccgtgtccttgagaacgcgggtctcctgaacgtcactgcgggcgctgcccagataggcgttcatcgtgtagttgtaccagggttcgtagttcttgacgttcttgccataggcgaggaagaactggtcgtcgctgtggcgcactgcgaggttcttgaaggttgggcagatgaatgccctggcatcgccgaggtaccgggccatcatccctccgtactccgggtgactcttcaactcgatgtcgccgttgcaccagcgcagatgcaggtactcggaaatgcctgcctcgacggggtagggtgttagttggctgaagtagcatctctgtggttccgcgaacctgcggtcgttgtcgtcgaggtacatcgccatcgcgatggtatagttcttcaggttgcccttgcaggcggcgccctgggccagctcacgggccttgcctagcgccggtatcaggatccccatgagcacggcgatgacggcgatgacgaccagcagctcgatcagtgtgaatgccttcgacttccgcatgacatggtcctccacgttctcgggaagcgcttacccagacctatcgtctcggcccacccgtctccgggcgcacccggcagggcatgccagtcagggtgcctgatcgcgttgcatcgcggcatttaccattctatcgacagaggttgccgtctgcaagagatatcggtatccgccggccgcccatcatccgtctatggggcggggatcaggcggacgagggccacgccgtgacgcgatacgttggcggcgaagcggctgtcgtacgtgcccaggtccttctgccgccaaaggtcccgcacgaggcgcttgcccgacaggcccagtagcggccagtcgaccgacatctcgcgaggcaattcggccaggttgaacaggcccaccgccagcgagccgtcggccatcgccttggccataatcagagtctcgtcgtcctgcaccagcggcctggcctggatgcccagcgggtcctgatcgacgtcgatcacctcggcattgcatagtacgttgagggtgaattcgtcgagatagcgcatgtcgcccgagtagaacagcggggcggccatcaggcaccacatcgacatgtagctgtactgctcgcttggcgtcagtggggtgggtttgggcggctcatcatgctgataggcgttgccgatgtgcccgatcaggatgtagtcggggtcgttccactgtccgggccgggcgtactcaaagtgccgggcgttgctcaggccgatccggtagaagccgggcagcaggccgccttgttcgaggcccaggtcgcccgtggtgcgccagcagtgcccgccgacctcgccaccccaggtccagacgttgcccatgccgtactggcacaggttcaggatgatgtcccggtcgagactcttgaggatgtcgcccatcaactgatatgggcgcttcaggtgctccaggtctgtgccgccggcgacctcactgtacgagcaccagtcgtgcttgaggaaatcgaaaccccgctcggcgaacttctccgcgtccacccgttcgtgttcgtagctggcgacgtacccggcgcacgtccagggtcccggccctgtgtagaggcctgccttgagacctttgctgtggatgtgatcgaccatgcccttgatgtcggggaacttggcgttgggcaggatcgcgcctttcgcgtcgcggtagggctcatcgccgcgcctcttcatccagcagtcgtcgatgttgacgtagctgtacccgtagtcggccatgccggagctgatcatgacgtcggcggcgtttcgcatgtgctcttcggtgacgtgataatagtggatgtaccaactgttccagcccatcggcggcgtcagcgcgagcgtgtcgccgacgatgatcgcgaaggtgcggcggtcgctgccgtggtcgtttttcgcttcgagtgtcacgacgtactcgcctcgcggcgtgggcacggtccccgtgatgattcccgtgctcgcgtcgagccgcagcgtctcgggcagcccggcggcgccaaacgcgatcggccgcgtccccgtgcaggggatgcggtagaggaacggatgtcccggtcggcagccgtagaccttcggcccattgatctgcggcgccgggcccggcttgggcgtcagcagcaccttctcctcggcagggggccgtggtgcgtcgacggtcgtcggcttgtcaccccccacgatgaactcggcgcccgcccagttggcgtggtcgtaatcgatgccgtcgccgccggaactgaccagcaggatcatctgcgtcacgccagccagcgagacgtcgacacgcttggcttcgtcgttgccggtcatcaggccgctgtcgaacagcaccttgccgtcgccatagaccttgaaccggaccgagccgcgaggcccggtggcgtcgtcgacgcccacccaggcgctgaaccgctcggttttgccgtccagggcgatgtagcagatcgattcggcgtgtgtcgccacgcccgtttcgaacgagcgcccgccgatcgacagcgttcgggcggtgatgctcttgttgacctggggcttgccccacccggtggacatcttcgtcaggtccagctcgcccagcggcaccgttgcgcccgaggcgactaccgcgccgagacagatcagagaacacaccggaatccatcgctgccttacgctcgaacgcatgttcacctcccgttgcctgagccccgtgtttgccgcagccacgatcgggccgcccccgaatcctaccacgatcctgtcgcggcatcaatggcggggcgagcggttcgctcacgttttcgccggcgtctttgtgcttctgtgcgttgccatgtgagcgcacaacaaaggggccggcgtcactgggacgcaggcccctgatcatggacattcgactgtggcgaaccttggcaagggttcactacggcgcgacggtgccgaggaactccacttccgcgatctgcatgttgccatcgctgttggcccgaagggtcgggaacaggatctgatagtacctgtaggcaaccgtgttggcgaactcgatcggggtggttg

SEQ ID NO: 939 - DNA, 174529 bp, Artificial Sequence; identical to SEQ ID NO: 498
  Synthetic Oligonucleotide

SEQ ID NO: 940 - DNA, 282368 bp, Artificial Sequence
  Synthetic Oligonucleotide
  misc_feature (1)..(90281): n is a, c, g, or t
nnnnnnnnnnnnnnnnnnnnnnnnnnnnnnnnnnnnnnnnnnnnnnnnnnnnnnnnnnnnnnnnnnnnnnnnnnnnnnnnnnnnnnnnnnnnnnnnnnnnnnnnnnnnnnnnnnnnnnnnnnnnnnnnnnnnnnnnnnnnnnnnnnnnnnnnnnnnnnnnnnnnnnnnnnnnnnnnnnnnnnnnnnnnnnnnnnnnnnnnnnnnnnnnnnnnnnnnnnnnnnnnnnnnnnnnnnnnnnnnnnnnnnnnnnnnnnnnnnnnnnnnnnnnnnnnnnnnnnnnnnnnnnnnnnnnnnnnnnnnnnnnnnnnnnnnnnnnnnnnnnnnnnnnnnnnnnnnnnnnnnnnnnnnnnnnnnnnnnnnnnnnnnnnnnnnnnnnnnnnnnnnnnnnnnnnnnnnnnnnnnnnnnnnnnnnnnnnnnnnnnnnnnnnnnnnnnnnnnnnnnnnnnnnnnnnnnnnnnnnnnnnnnnnnnnnnnnnnnnnnnnnnnnnnnnnnnnnnnnnnnnnnnnnnnnnnnnnnnnnnnnnnnnnnnnnnnnnnnnnnnnnnnnnnnnnnnnnnnnnnnnnnnnnnnnnnnnnnnnnnnnnnnnnnnnnnnnnnnnnnnnnnnnnnnnnnnnnnnnnnnnnnnnnnnnnnnnnnnnnnnnnnnnnnnnnnnnnnnnnnnnnnnnnnnnnnnnnnnnnnnnnnnnnnnnnnnnnnnnnnnnnnnnnnnnnnnnnnnnnnnnnnnnnnnnnnnnnnnnnnnnnnnnnnnnnnnnnnnnnnnnnnnnnnnnnnnnnnnnnnnnnnnnnnnnnnnnnnnnnnnnnnnnnnnnnnnnnnnnnnnnnnnnnnnnnnnnnnnnnnnnnnnnnnnnnnnnnnnnnnnnnnnnnnnnnnnnnnnnnnnnnnnnnnnnnnnnnnnnnnnnnnnnnnnnnnnnnnnnnnnnnnnnnnnnnnnnnnnnnnnnnnnnnnnnnnnnnnnnnnnnnnnnnnnnnnnnnnnnnnnnnnnnnnnnnnnnnnnnnnnnnnnnnnnnnnnnnnnnnnnnnnnnnnnnnnnnnnnnnnnnnnnnnnnnnnnnnnnnnnnnnnnnnnnnnnnnnnnnnnnnnnnnnnnnnnnnnnnnnnnnnnnnnnnnnnnnnnnnnnnnnnnnnnnnnnnnnnnnnnnnnnnnnnnnnnnnnnnnnnnnnnnnnnnnnnnnnnnnnnnnnnnnnnnnnnnnnnnnnnnnnnnnnnnnnnnnnnnnnnnnnnnnnnnnnnnnnnnnnnnnnnnnnnnnnnnnnnnnnnnnnnnnnnnnnnnnnnnnnnnnnnnnnnnnnnnnnnnnnnnnnnnnnnnnnnnnnnnnnnnnnnnnnnnnnnnnnnnnnnnnnnnnnnnnnnnnnnnnnnnnnnnnnnnnnnnnnnnnnnnnnnnnnnnnnnnnnnnnnnnnnnnnnnnnnnnnnnnnnnnnnnnnnnnnnnnnnnnnnnnnnnnnnnnnnnnnnnnnnnnnnnnnnnnnnnnnnnnnnnnnnnnnnnnnnnnnnnnnnnnnnnnnnnnnnnnnnnnnnnnnnnnnnnnnnnnnnnnnnnnnnnnnnnnnnnnnnnnnnnnnnnnnnnnnnnnnnnnnnnnnnnnnnnnnnnnnnnnnnnnnnnnnnnnnnnnnnnnnnnnnnnnnnnnnnnnnnnnnnnnnnnnnnnnnnnnnnnnnnnnnnnnnnnnnnnnnnnnnnnnnnnnnnnnnnnnnnnnnnnnnnnnnnnnnnnnnnnnnnnnnnnnnnnnnnnnnnnnnnnnnnnnnnnnnnnnnnnnnnnnnnnnnnnnnnnnnnnnnnnnnnnnnnnnnnnnnnnnnnnnnnnnnnnnnnnnnnnnnnnnnnnnnnnnnnnnnnnnnnnnnnnnnnnnnnnnnnnnnnnnnnnnnnnnnnnnnnnnnnnnnnnnnnnnnnnnnnnnnnnnnnnnnnnnnnnnnnnnnnnnnnnnnnnnnnnnnnnnnnnnnnnnnnnnnnnnnnnnnnnnnnnnnnnnnnnnnnnnnnnnnnnnnnnnnnnnnnnnnnnnnnnnnnnnnnnnnnnnnnnnnnnnnnnnnnnnnnnnnnnnnnnnnnnnnnnnnnnnnnnnnnnnnnnnnnnnnnnnnnnnnnnnnnnnnnnnnnnnnnnnnnnnnnnnnnnnnnnnnnnnnnnnnnnnnnnnnnnnnnnnnnnnnnnnnnnnnnnnnnnnnnnnnnnnnnnnnnnnnnnnnnnnnnnnnnnnnnnnnnnnnnnnnnnnnnnnnnnnnnnnnnnnnnnnnnnnnnnnnnnnnnnnnnnnnnnnnnnnnnnnnnnnnnnnnnnnnnnnnnnnnnnnnnnnnnnnnnnnnnnnnnnnnnnnnnnnnnnnnnnnnnnnnnnnnnnnnnnnnnnnnnnnnnnnnnnnnnnnnnnnnnnnnnnnnnnnnnnnnnnnnnnnnnnnnnnnnnnnnnnnnnnnnnnnnnnnnnnnnnnnnnnnnnnnnnnnnnnnnnnnnnnnnnnnnnnnnnnnnnnnnnnnnnnnnnnnnnnnnnnnnnnnnnnnnnnnnnnnnnnnnnnnnnnnnnnnnnnnnnnnnnnnnnnnnnnnnnnnnnnnnnnnnnnnnnnnnnnnnnnnnnnnnnnnnnnnnnnnnnnnnnnnnnnnnnnnnnnnnnnnnnnnnnnnnnnnnnnnnnnnnnnnnnnnnnnnnnnnnnnnnnnnnnnnnnnnnnnnnnnnnnnnnnnnnnnnnnnnnnnnnnnnnnnnnnnnnnnnnnnnnnnnnnnnnnnnnnnnnnnnnnnnnnnnnnnnnnnnnnnnnnnnnnnnnnnnnnnnnnnnnnnnnnnnnnnnnnnnnnnnnnnnnnnnnnnnnnnnnnnnnnnnnnnnnnnnnnnnnnnnnnnnnnnnnnnnnnnnnnnnnnnnnnnnnnnnnnnnnnnnnnnnnnnnnnnnnnnnnnnnnnnnnnnnnnnnnnnnnnnnnnnnnnnnnnnnnnnnnnnnnnnnnnnnnnnnnnnnnnnnnnnnnnnnnnnnnnnnnnnnnnnnnnnnnnnnnnnnnnnnnnnnnnnnnnnnnnnnnnnnnnnnnnnnnnnnnnnnnnnnnnnnnnnnnnnnnnnnnnnnnnnnnnnnnnnnnnnnnnnnnnnnnnnnnnnnnnnnnnnnnnnnnnnnnnnnnnnnnnnnnnnnnnnnnnnnnnnnnnnnnnnnnnnnnnnnnnnnnnnnnnnnnnnnnnnnnnnnnnnnnnnnnnnnnnnnnnnnnnnnnnnnnnnnnnnnnnnnnnnnnnnnnnnnnnnnnnnnnnnnnnnnnnnnnnnnnnnnnnnnnnnnnnnnnnnnnnnnnnnnnnnnnnnnnnnnnnnnnnnnnnnnnnnnnnnnnnnnnnnnnnnnnnnnnnnnnnnnnnnnnnnnnnnnnnnnnnnnnnnnnnnnnnnnnnnnnnnnnnnnnnnnnnnnnnnnnnnnnnnnnnnnnnnnnnnnnnnnnnnnnnnnnnnnnnnnnnnnnnnnnnnnnnnnnnnnnnnnnnnnnnnnnnnnnnnnnnnnnnnnnnnnnnnnnnnnnnnnnnnnnnnnnnnnnnnnnnnnnnnnnnnnnnnnnnnnnnnnnnnnnnnnnnnnnnnnnnnnnnnnnnnnnnnnnnnnnnnnnnnnnnnnnnnnnnnnnnnnnnnnnnnnnnnnnnnnnnnnnnnnnnnnnnnnnnnnnnnnnnnnnnnnnnnnnnnnnnnnnnnnnnnnnnnnnnnnnnnnnnnnnnnnnnnnnnnnnnnnnnnnnnnnnnnnnnnnnnnnnnnnnnnnnnnnnnnnnnnnnnnnnnnnnnnnnnnnnnnnnnnnnnnnnnnnnnnnnnnnnnnnnnnnnnnnnnnnnnnnnnnnnnnnnnnnnnnnnnnnnnnnnnnnnnnnnnnnnnnnnnnnnnnnnnnnnnnnnnnnnnnnnnnnnnnnnnnnnnnnnnnnnnnnnnnnnnnnnnnnnnnnnnnnnnnnnnnnnnnnnnnnnnnnnnnnnnnnnnnnnnnnnnnnnnnnnnnnnnnnnnnnnnnnnnnnnnnnnnnnnnnnnnnnnnnnnnnnnnnnnnnnnnnnnnnnnnnnnnnnnnnnnnnnnnnnnnnnnnnnnnnnnnnnnnnnnnnnnnnnnnnnnnnnnnnnnnnnnnnnnnnnnnnnnnnnnnnnnnnnnnnnnnnnnnnnnnnnnnnnnnnnnnnnnnnnnnnnnnnnnnnnnnnnnnnnnnnnnnnnnnnnnnnnnnnnnnnnnnnnnnnnnnnnnnnnnnnnnnnnnnnnnnnnnnnnnnnnnnnnnnnnnnnnnnnnnnnnnnnnnnnnnnnnnnnnnnnnnnnnnnnnnnnnnnnnnnnnnnnnnnnnnnnnnnnnnnnnnnnnnnnnnnnnnnnnnnnnnnnnnnnnnnnnnnnnnnnnnnnnnnnnnnnnnnnnnnnnnnnnnnnnnnnnnnnnnnnnnnnnnnnnnnnnnnnnnnnnnnnnnnnnnnnnnnnnnnnnnnnnnnnnnnnnnnnnnnnnnnnnnnnnnnnnnnnnnnnnnnnnnnnnnnnnnnnnnnnnnnnnnnnnnnnnnnnnnnnnnnnnnnnnnnnnnnnnnnnnnnnnnnnnnnnnnnnnnnnnnnnnnnnnnnnnnnnnnnnnnnnnnnnnnnnnnnnnnnnnnnnnnnnnnnnnnnnnnnnnnnnnnnnnnnnnnnnnnnnnnnnnnnnnnnnnnnnnnnnnnnnnnnnnnnnnnnnnnnnnnnnnnnnnnnnnnnnnnnnnnnnnnnnnnnnnnnnnnnnnnnnnnnnnnnnnnnnnnnnnnnnnnnnnnnnnnnnnnnnnnnnnnnnnnnnnnnnnnnnnnnnnnnnnnnnnnnnnnnnnnnnnnnnnnnnnnnnnnnnnnnnnnnnnnnnnnnnnnnnnnnnnnnnnnnnnnnnnnnnnnnnnnnnnnnnnnnnnnnnnnnnnnnnnnnnnnnnnnnnnnnnnnnnnnnnnnnnnnnnnnnnnnnnnnnnnnnnnnnnnnnnnnnnnnnnnnnnnnnnnnnnnnnnnnnnnnnnnnnnnnnnnnnnnnnnnnnnnnnnnnnnnnnnnnnnnnnnnnnnnnnnnnnnnnnnnnnnnnnnnnnnnnnnnnnnnnnnnnnnnnnnnnnnnnnnnnnnnnnnnnnnnnnnnnnnnnnnnnnnnnnnnnnnnnnnnnnnnnnnnnnnnnnnnnnnnnnnnnnnnnnnnnnnnnnnnnnnnnnnnnnnnnnnnnnnnnnnnnnnnnnnnnnnnnnnnnnnnnnnnnnnnnnnnnnnnnnnnnnnnnnnnnnnnnnnnnnnnnnnnnnnnnnnnnnnnnnnnnnnnnnnnnnnnnnnnnnnnnnnnnnnnnnnnnnnnnnnnnnnnnnnnnnnnnnnnnnnnnnnnnnnnnnnnnnnnnnnnnnnnnnnnnnnnnnnnnnnnnnnnnnnnnnnnnnnnnnnnnnnnnnnnnnnnnnnnnnnnnnnnnnnnnnnnnnnnnnnnnnnnnnnnnnnnnnnnnnnnnnnnnnnnnnnnnnnnnnnnnnnnnnnnnnnnnnnnnnnnnnnnnnnnnnnnnnnnnnnnnnnnnnnnnnnnnnnnnnnnnnnnnnnnnnnnnnnnnnnnnnnnnnnnnnnnnnnnnnnnnnnnnnnnnnnnnnnnnnnnnnnnnnnnnnnnnnnnnnnnnnnnnnnnnnnnnnnnnnnnnnnnnnnnnnnnnnnnnnnnnnnnnnnnnnnnnnnnnnnnnnnnnnnnnnnnnnnnnnnnnnnnnnnnnnnnnnnnnnnnnnnnnnnnnnnnnnnnnnnnnnnnnnnnnnnnnnnnnnnnnnnnnnnnnnnnnnnnnnnnnnnnnnnnnnnnnnnnnnnnnnnnnnnnnnnnnnnnnnnnnnnnnnnnnnnnnnnnnnnnnnnnnnnnnnnnnnnnnnnnnnnnnnnnnnnnnnnnnnnnnnnnnnnnnnnnnnnnnnnnnnnnnnnnnnnnnnnnnnnnnnnnnnnnnnnnnnnnnnnnnnnnnnnnnnnnnnnnnnnnnnnnnnnnnnnnnnnnnnnnnnnnnnnnnnnnnnnnnnnnnnnnnnnnnnnnnnnnnnnnnnnnnnnnnnnnnnnnnnnnnnnnnnnnnnnnnnnnnnnnnnnnnnnnnnnnnnnnnnnnnnnnnnnnnnnnnnnnnnnnnnnnnnnnnnnnnnnnnnnnnnnnnnnnnnnnnnnnnnnnnnnnnnnnnnnnnnnnnnnnnnnnnnnnnnnnnnnnnnnnnnnnnnnnnnnnnnnnnnnnnnnnnnnnnnnnnnnnnnnnnnnnnnnnnnnnnnnnnnnnnnnnnnnnnnnnnnnnnnnnnnnnnnnnnnnnnnnnnnnnnnnnnnnnnnnnnnnnnnnnnnnnnnnnnnnnnnnnnnnnnnnnnnnnnnnnnnnnnnnnnnnnnnnnnnnnnnnnnnnnnnnnnnnnnnnnnnnnnnnnnnnnnnnnnnnnnnnnnnnnnnnnnnnnnnnnnnnnnnnnnnnnnnnnnnnnnnnnnnnnnnnnnnnnnnnnnnnnnnnnnnnnnnnnnnnnnnnnnnnnnnnnnnnnnnnnnnnnnnnnnnnnnnnnnnnnnnnnnnnnnnnnnnnnnnnnnnnnnnnnnnnnnnnnnnnnnnnnnnnnnnnnnnnnnnnnnnnnnnnnnnnnnnnnnnnnnnnnnnnnnnnnnnnnnnnnnnnnnnnnnnnnnnnnnnnnnnnnnnnnnnnnnnnnnnnnnnnnnnnnnnnnnnnnnnnnnnnnnnnnnnnnnnnnnnnnnnnnnnnnnnnnnnnnnnnnnnnnnnnnnnnnnnnnnnnnnnnnnnnnnnnnnnnnnnnnnnnnnnnnnnnnnnnnnnnnnnnnnnnnnnnnnnnnnnnnnnnnnnnnnnnnnnnnnnnnnnnnnnnnnnnnnnnnnnnnnnnnnnnnnnnnnnnnnnnnnnnnnnnnnnnnnnnnnnnnnnnnnnnnnnnnnnnnnnnnnnnnnnnnnnnnnnnnnnnnnnnnnnnnnnnnnnnnnnnnnnnnnnnnnnnnnnnnnnnnnnnnnnnnnnnnnnnnnnnnnnnnnnnnnnnnnnnnnnnnnnnnnnnnnnnnnnnnnnnnnnnnnnnnnnnnnnnnnnnnnnnnnnnnnnnnnnnnnnnnnnnnnnnnnnnnnnnnnnnnnnnnnnnnnnnnnnnnnnnnnnnnnnnnnnnnnnnnnnnnnnnnnnnnnnnnnnnnnnnnnnnnnnnnnnnnnnnnnnnnnnnnnnnnnnnnnnnnnnnnnnnnnnnnnnnnnnnnnnnnnnnnnnnnnnnnnnnnnnnnnnnnnnnnnnnnnnnnnnnnnnnnnnnnnnnnnnnnnnnnnnnnnnnnnnnnnnnnnnnnnnnnnnnnnnnnnnnnnnnnnnnnnnnnnnnnnnnnnnnnnnnnnnnnnnnnnnnnnnnnnnnnnnnnnnnnnnnnnnnnnnnnnnnnnnnnnnnnnnnnnnnnnnnnnnnnnnnnnnnnnnnnnnnnnnnnnnnnnnnnnnnnnnnnnnnnnnnnnnnnnnnnnnnnnnnnnnnnnnnnnnnnnnnnnnnnnnnnnnnnnnnnnnnnnnnnnnnnnnnnnnnnnnnnnnnnnnnnnnnnnnnnnnnnnnnnnnnnnnnnnnnnnnnnnnnnnnnnnnnnnnnnnnnnnnnnnnnnnnnnnnnnnnnnnnnnnnnnnnnnnnnnnnnnnnnnnnnnnnnnnnnnnnnnnnnnnnnnnnnnnnnnnnnnnnnnnnnnnnnnnnnnnnnnnnnnnnnnnnnnnnnnnnnnnnnnnnnnnnnnnnnnnnnnnnnnnnnnnnnnnnnnnnnnnnnnnnnnnnnnnnnnnnnnnnnnnnnnnnnnnnnnnnnnnnnnnnnnnnnnnnnnnnnnnnnnnnnnnnnnnnnnnnnnnnnnnnnnnnnnnnnnnnnnnnnnnnnnnnnnnnnnnnnnnnnnnnnnnnnnnnnnnnnnnnnnnnnnnnnnnnnnnnnnnnnnnnnnnnnnnnnnnnnnnnnnnnnnnnnnnnnnnnnnnnnnnnnnnnnnnnnnnnnnnnnnnnnnnnnnnnnnnnnnnnnnnnnnnnnnnnnnnnnnnnnnnnnnnnnnnnnnnnnnnnnnnnnnnnnnnnnnnnnnnnnnnnnnnnnnnnnnnnnnnnnnnnnnnnnnnnnnnnnnnnnnnnnnnnnnnnnnnnnnnnnnnnnnnnnnnnnnnnnnnnnnnnnnnnnnnnnnnnnnnnnnnnnnnnnnnnnnnnnnnnnnnnnnnnnnnnnnnnnnnnnnnnnnnnnnnnnnnnnnnnnnnnnnnnnnnnnnnnnnnnnnnnnnnnnnnnnnnnnnnnnnnnnnnnnnnnnnnnnnnnnnnnnnnnnnnnnnnnnnnnnnnnnnnnnnnnnnnnnnnnnnnnnnnnnnnnnnnnnnnnnnnnnnnnnnnnnnnnnnnnnnnnnnnnnnnnnnnnnnnnnnnnnnnnnnnnnnnnnnnnnnnnnnnnnnnnnnnnnnnnnnnnnnnnnnnnnnnnnnnnnnnnnnnnnnnnnnnnnnnnnnnnnnnnnnnnnnnnnnnnnnnnnnnnnnnnnnnnnnnnnnnnnnnnnnnnnnnnnnnnnnnnnnnnnnnnnnnnnnnnnnnnnnnnnnnnnnnnnnnnnnnnnnnnnnnnnnnnnnnnnnnnnnnnnnnnnnnnnnnnnnnnnnnnnnnnnnnnnnnnnnnnnnnnnnnnnnnnnnnnnnnnnnnnnnnnnnnnnnnnnnnnnnnnnnnnnnnnnnnnnnnnnnnnnnnnnnnnnnnnnnnnnnnnnnnnnnnnnnnnnnnnnnnnnnnnnnnnnnnnnnnnnnnnnnnnnnnnnnnnnnnnnnnnnnnnnnnnnnnnnnnnnnnnnnnnnnnnnnnnnnnnnnnnnnnnnnnnnnnnnnnnnnnnnnnnnnnnnnnnnnnnnnnnnnnnnnnnnnnnnnnnnnnnnnnnnnnnnnnnnnnnnnnnnnnnnnnnnnnnnnnnnnnnnnnnnnnnnnnnnnnnnnnnnnnnnnnnnnnnnnnnnnnnnnnnnnnnnnnnnnnnnnnnnnnnnnnnnnnnnnnnnnnnnnnnnnnnnnnnnnnnnnnnnnnnnnnnnnnnnnnnnnnnnnnnnnnnnnnnnnnnnnnnnnnnnnnnnnnnnnnnnnnnnnnnnnnnnnnnnnnnnnnnnnnnnnnnnnnnnnnnnnnnnnnnnnnnnnnnnnnnnnnnnnnnnnnnnnnnnnnnnnnnnnnnnnnnnnnnnnnnnnnnnnnnnnnnnnnnnnnnnnnnnnnnnnnnnnnnnnnnnnnnnnnnnnnnnnnnnnnnnnnnnnnnnnnnnnnnnnnnnnnnnnnnnnnnnnnnnnnnnnnnnnnnnnnnnnnnnnnnnnnnnnnnnnnnnnnnnnnnnnnnnnnnnnnnnnnnnnnnnnnnnnnnnnnnnnnnnnnnnnnnnnnnnnnnnnnnnnnnnnnnnnnnnnnnnnnnnnnnnnnnnnnnnnnnnnnnnnnnnnnnnnnnnnnnnnnnnnnnnnnnnnnnnnnnnnnnnnnnnnnnnnnnnnnnnnnnnnnnnnnnnnnnnnnnnnnnnnnnnnnnnnnnnnnnnnnnnnnnnnnnnnnnnnnnnnnnnnnnnnnnnnnnnnnnnnnnnnnnnnnnnnnnnnnnnnnnnnnnnnnnnnnnnnnnnnnnnnnnnnnnnnnnnnnnnnnnnnnnnnnnnnnnnnnnnnnnnnnnnnnnnnnnnnnnnnnnnnnnnnnnnnnnnnnnnnnnnnnnnnnnnnnnnnnnnnnnnnnnnnnnnnnnnnnnnnnnnnnnnnnnnnnnnnnnnnnnnnnnnnnnnnnnnnnnnnnnnnnnnnnnnnnnnnnnnnnnnnnnnnnnnnnnnnnnnnnnnnnnnnnnnnnnnnnnnnnnnnnnnnnnnnnnnnnnnnnnnnnnnnnnnnnnnnnnnnnnnnnnnnnnnnnnnnnnnnnnnnnnnnnnnnnnnnnnnnnnnnnnnnnnnnnnnnnnnnnnnnnnnnnnnnnnnnnnnnnnnnnnnnnnnnnnnnnnnnnnnnnnnnnnnnnnnnnnnnnnnnnnnnnnnnnnnnnnnnnnnnnnnnnnnnnnnnnnnnnnnnnnnnnnnnnnnnnnnnnnnnnnnnnnnnnnnnnnnnnnnnnnnnnnnnnnnnnnnnnnnnnnnnnnnnnnnnnnnnnnnnnnnnnnnnnnnnnnnnnnnnnnnnnnnnnnnnnnnnnnnnnnnnnnnnnnnnnnnnnnnnnnnnnnnnnnnnnnnnnnnnnnnnnnnnnnnnnnnnnnnnnnnnnnnnnnnnnnnnnnnnnnnnnnnnnnnnnnnnnnnnnnnnnnnnnnnnnnnnnnnnnnnnnnnnnnnnnnnnnnnnnnnnnnnnnnnnnnnnnnnnnnnnnnnnnnnnnnnnnnnnnnnnnnnnnnnnnnnnnnnnnnnnnnnnnnnnnnnnnnnnnnnnnnnnnnnnnnnnnnnnnnnnnnnnnnnnnnnnnnnnnnnnnnnnnnnnnnnnnnnnnnnnnnnnnnnnnnnnnnnnnnnnnnnnnnnnnnnnnnnnnnnnnnnnnnnnnnnnnnnnnnnnnnnnnnnnnnnnnnnnnnnnnnnnnnnnnnnnnnnnnnnnnnnnnnnnnnnnnnnnnnnnnnnnnnnnnnnnnnnnnnnnnnnnnnnnnnnnnnnnnnnnnnnnnnnnnnnnnnnnnnnnnnnnnnnnnnnnnnnnnnnnnnnnnnnnnnnnnnnnnnnnnnnnnnnnnnnnnnnnnnnnnnnnnnnnnnnnnnnnnnnnnnnnnnnnnnnnnnnnnnnnnnnnnnnnnnnnnnnnnnnnnnnnnnnnnnnnnnnnnnnnnnnnnnnnnnnnnnnnnnnnnnnnnnnnnnnnnnnnnnnnnnnnnnnnnnnnnnnnnnnnnnnnnnnnnnnnnnnnnnnnnnnnnnnnnnnnnnnnnnnnnnnnnnnnnnnnnnnnnnnnnnnnnnnnnnnnnnnnnnnnnnnnnnnnnnnnnnnnnnnnnnnnnnnnnnnnnnnnnnnnnnnnnnnnnnnnnnnnnnnnnnnnnnnnnnnnnnnnnnnnnnnnnnnnnnnnnnnnnnnnnnnnnnnnnnnnnnnnnnnnnnnnnnnnnnnnnnnnnnnnnnnnnnnnnnnnnnnnnnnnnnnnnnnnnnnnnnnnnnnnnnnnnnnnnnnnnnnnnnnnnnnnnnnnnnnnnnnnnnnnnnnnnnnnnnnnnnnnnnnnnnnnnnnnnnnnnnnnnnnnnnnnnnnnnnnnnnnnnnnnnnnnnnnnnnnnnnnnnnnnnnnnnnnnnnnnnnnnnnnnnnnnnnnnnnnnnnnnnnnnnnnnnnnnnnnnnnnnnnnnnnnnnnnnnnnnnnnnnnnnnnnnnnnnnnnnnnnnnnnnnnnnnnnnnnnnnnnnnnnnnnnnnnnnnnnnnnnnnnnnnnnnnnnnnnnnnnnnnnnnnnnnnnnnnnnnnnnnnnnnnnnnnnnnnnnnnnnnnnnnnnnnnnnnnnnnnnnnnnnnnnnnnnnnnnnnnnnnnnnnnnnnnnnnnnnnnnnnnnnnnnnnnnnnnnnnnnnnnnnnnnnnnnnnnnnnnnnnnnnnnnnnnnnnnnnnnnnnnnnnnnnnnnnnnnnnnnnnnnnnnnnnnnnnnnnnnnnnnnnnnnnnnnnnnnnnnnnnnnnnnnnnnnnnnnnnnnnnnnnnnnnnnnnnnnnnnnnnnnnnnnnnnnnnnnnnnnnnnnnnnnnnnnnnnnnnnnnnnnnnnnnnnnnnnnnnnnnnnnnnnnnnnnnnnnnnnnnnnnnnnnnnnnnnnnnnnnnnnnnnnnnnnnnnnnnnnnnnnnnnnnnnnnnnnnnnnnnnnnnnnnnnnnnnnnnnnnnnnnnnnnnnnnnnnnnnnnnnnnnnnnnnnnnnnnnnnnnnnnnnnnnnnnnnnnnnnnnnnnnnnnnnnnnnnnnnnnnnnnnnnnnnnnnnnnnnnnnnnnnnnnnnnnnnnnnnnnnnnnnnnnnnnnnnnnnnnnnnnnnnnnnnnnnnnnnnnnnnnnnnnnnnnnnnnnnnnnnnnnnnnnnnnnnnnnnnnnnnnnnnnnnnnnnnnnnnnnnnnnnnnnnnnnnnnnnnnnnnnnnnnnnnnnnnnnnnnnnnnnnnnnnnnnnnnnnnnnnnnnnnnnnnnnnnnnnnnnnnnnnnnnnnnnnnnnnnnnnnnnnnnnnnnnnnnnnnnnnnnnnnnnnnnnnnnnnnnnnnnnnnnnnnnnnnnnnnnnnnnnnnnnnnnnnnnnnnnnnnnnnnnnnnnnnnnnnnnnnnnnnnnnnnnnnnnnnnnnnnnnnnnnnnnnnnnnnnnnnnnnnnnnnnnnnnnnnnnnnnnnnnnnnnnnnnnnnnnnnnnnnnnnnnnnnnnnnnnnnnnnnnnnnnnnnnnnnnnnnnnnnnnnnnnnnnnnnnnnnnnnnnnnnnnnnnnnnnnnnnnnnnnnnnnnnnnnnnnnnnnnnnnnnnnnnnnnnnnnnnnnnnnnnnnnnnnnnnnnnnnnnnnnnnnnnnnnnnnnnnnnnnnnnnnnnnnnnnnnnnnnnnnnnnnnnnnnnnnnnnnnnnnnnnnnnnnnnnnnnnnnnnnnnnnnnnnnnnnnnnnnnnnnnnnnnnnnnnnnnnnnnnnnnnnnnnnnnnnnnnnnnnnnnnnnnnnnnnnnnnnnnnnnnnnnnnnnnnnnnnnnnnnnnnnnnnnnnnnnnnnnnnnnnnnnnnnnnnnnnnnnnnnnnnnnnnnnnnnnnnnnnnnnnnnnnnnnnnnnnnnnnnnnnnnnnnnnnnnnnnnnnnnnnnnnnnnnnnnnnnnnnnnnnnnnnnnnnnnnnnnnnnnnnnnnnnnnnnnnnnnnnnnnnnnnnnnnnnnnnnnnnnnnnnnnnnnnnnnnnnnnnnnnnnnnnnnnnnnnnnnnnnnnnnnnnnnnnnnnnnnnnnnnnnnnnnnnnnnnnnnnnnnnnnnnnnnnnnnnnnnnnnnnnnnnnnnnnnnnnnnnnnnnnnnnnnnnnnnnnnnnnnnnnnnnnnnnnnnnnnnnnnnnnnnnnnnnnnnnnnnnnnnnnnnnnnnnnnnnnnnnnnnnnnnnnnnnnnnnnnnnnnnnnnnnnnnnnnnnnnnnnnnnnnnnnnnnnnnnnnnnnnnnnnnnnnnnnnnnnnnnnnnnnnnnnnnnnnnnnnnnnnnnnnnnnnnnnnnnnnnnnnnnnnnnnnnnnnnnnnnnnnnnnnnnnnnnnnnnnnnnnnnnnnnnnnnnnnnnnnnnnnnnnnnnnnnnnnnnnnnnnnnnnnnnnnnnnnnnnnnnnnnnnnnnnnnnnnnnnnnnnnnnnnnnnnnnnnnnnnnnnnnnnnnnnnnnnnnnnnnnnnnnnnnnnnnnnnnnnnnnnnnnnnnnnnnnnnnnnnnnnnnnnnnnnnnnnnnnnnnnnnnnnnnnnnnnnnnnnnnnnnnnnnnnnnnnnnnnnnnnnnnnnnnnnnnnnnnnnnnnnnnnnnnnnnnnnnnnnnnnnnnnnnnnnnnnnnnnnnnnnnnnnnnnnnnnnnnnnnnnnnnnnnnnnnnnnnnnnnnnnnnnnnnnnnnnnnnnnnnnnnnnnnnnnnnnnnnnnnnnnnnnnnnnnnnnnnnnnnnnnnnnnnnnnnnnnnnnnnnnnnnnnnnnnnnnnnnnnnnnnnnnnnnnnnnnnnnnnnnnnnnnnnnnnnnnnnnnnnnnnnnnnnnnnnnnnnnnnnnnnnnnnnnnnnnnnnnnnnnnnnnnnnnnnnnnnnnnnnnnnnnnnnnnnnnnnnnnnnnnnnnnnnnnnnnnnnnnnnnnnnnnnnnnnnnnnnnnnnnnnnnnnnnnnnnnnnnnnnnnnnnnnnnnnnnnnnnnnnnnnnnnnnnnnnnnnnnnnnnnnnnnnnnnnnnnnnnnnnnnnnnnnnnnnnnnnnnnnnnnnnnnnnnnnnnnnnnnnnnnnnnnnnnnnnnnnnnnnnnnnnnnnnnnnnnnnnnnnnnnnnnnnnnnnnnnnnnnnnnnnnnnnnnnnnnnnnnnnnnnnnnnnnnnnnnnnnnnnnnnnnnnnnnnnnnnnnnnnnnnnnnnnnnnnnnnnnnnnnnnnnnnnnnnnnnnnnnnnnnnnnnnnnnnnnnnnnnnnnnnnnnnnnnnnnnnnnnnnnnnnnnnnnnnnnnnnnnnnnnnnnnnnnnnnnnnnnnnnnnnnnnnnnnnnnnnnnnnnnnnnnnnnnnnnnnnnnnnnnnnnnnnnnnnnnnnnnnnnnnnnnnnnnnnnnnnnnnnnnnnnnnnnnnnnnnnnnnnnnnnnnnnnnnnnnnnnnnnnnnnnnnnnnnnnnnnnnnnnnnnnnnnnnnnnnnnnnnnnnnnnnnnnnnnnnnnnnnnnnnnnnnnnnnnnnnnnnnnnnnnnnnnnnnnnnnnnnnnnnnnnnnnnnnnnnnnnnnnnnnnnnnnnnnnnnnnnnnnnnnnnnnnnnnnnnnnnnnnnnnnnnnnnnnnnnnnnnnnnnnnnnnnnnnnnnnnnnnnnnnnnnnnnnnnnnnnnnnnnnnnnnnnnnnnnnnnnnnnnnnnnnnnnnnnnnnnnnnnnnnnnnnnnnnnnnnnnnnnnnnnnnnnnnnnnnnnnnnnnnnnnnnnnnnnnnnnnnnnnnnnnnnnnnnnnnnnnnnnnnnnnnnnnnnnnnnnnnnnnnnnnnnnnnnnnnnnnnnnnnnnnnnnnnnnnnnnnnnnnnnnnnnnnnnnnnnnnnnnnnnnnnnnnnnnnnnnnnnnnnnnnnnnnnnnnnnnnnnnnnnnnnnnnnnnnnnnnnnnnnnnnnnnnnnnnnnnnnnnnnnnnnnnnnnnnnnnnnnnnnnnnnnnnnnnnnnnnnnnnnnnnnnnnnnnnnnnnnnnnnnnnnnnnnnnnnnnnnnnnnnnnnnnnnnnnnnnnnnnnnnnnnnnnnnnnnnnnnnnnnnnnnnnnnnnnnnnnnnnnnnnnnnnnnnnnnnnnnnnnnnnnnnnnnnnnnnnnnnnnnnnnnnnnnnnnnnnnnnnnnnnnnnnnnnnnnnnnnnnnnnnnnnnnnnnnnnnnnnnnnnnnnnnnnnnnnnnnnnnnnnnnnnnnnnnnnnnnnnnnnnnnnnnnnnnnnnnnnnnnnnnnnnnnnnnnnnnnnnnnnnnnnnnnnnnnnnnnnnnnnnnnnnnnnnnnnnnnnnnnnnnnnnnnnnnnnnnnnnnnnnnnnnnnnnnnnnnnnnnnnnnnnnnnnnnnnnnnnnnnnnnnnnnnnnnnnnnnnnnnnnnnnnnnnnnnnnnnnnnnnnnnnnnnnnnnnnnnnnnnnnnnnnnnnnnnnnnnnnnnnnnnnnnnnnnnnnnnnnnnnnnnnnnnnnnnnnnnnnnnnnnnnnnnnnnnnnnnnnnnnnnnnnnnnnnnnnnnnnnnnnnnnnnnnnnnnnnnnnnnnnnnnnnnnnnnnnnnnnnnnnnnnnnnnnnnnnnnnnnnnnnnnnnnnnnnnnnnnnnnnnnnnnnnnnnnnnnnnnnnnnnnnnnnnnnnnnnnnnnnnnnnnnnnnnnnnnnnnnnnnnnnnnnnnnnnnnnnnnnnnnnnnnnnnnnnnnnnnnnnnnnnnnnnnnnnnnnnnnnnnnnnnnnnnnnnnnnnnnnnnnnnnnnnnnnnnnnnnnnnnnnnnnnnnnnnnnnnnnnnnnnnnnnnnnnnnnnnnnnnnnnnnnnnnnnnnnnnnnnnnnnnnnnnnnnnnnnnnnnnnnnnnnnnnnnnnnnnnnnnnnnnnnnnnnnnnnnnnnnnnnnnnnnnnnnnnnnnnnnnnnnnnnnnnnnnnnnnnnnnnnnnnnnnnnnnnnnnnnnnnnnnnnnnnnnnnnnnnnnnnnnnnnnnnnnnnnnnnnnnnnnnnnnnnnnnnnnnnnnnnnnnnnnnnnnnnnnnnnnnnnnnnnnnnnnnnnnnnnnnnnnnnnnnnnnnnnnnnnnnnnnnnnnnnnnnnnnnnnnnnnnnnnnnnnnnnnnnnnnnnnnnnnnnnnnnnnnnnnnnnnnnnnnnnnnnnnnnnnnnnnnnnnnnnnnnnnnnnnnnnnnnnnnnnnnnnnnnnnnnnnnnnnnnnnnnnnnnnnnnnnnnnnnnnnnnnnnnnnnnnnnnnnnnnnnnnnnnnnnnnnnnnnnnnnnnnnnnnnnnnnnnnnnnnnnnnnnnnnnnnnnnnnnnnnnnnnnnnnnnnnnnnnnnnnnnnnnnnnnnnnnnnnnnnnnnnnnnnnnnnnnnnnnnnnnnnnnnnnnnnnnnnnnnnnnnnnnnnnnnnnnnnnnnnnnnnnnnnnnnnnnnnnnnnnnnnnnnnnnnnnnnnnnnnnnnnnnnnnnnnnnnnnnnnnnnnnnnnnnnnnnnnnnnnnnnnnnnnnnnnnnnnnnnnnnnnnnnnnnnnnnnnnnnnnnnnnnnnnnnnnnnnnnnnnnnnnnnnnnnnnnnnnnnnnnnnnnnnnnnnnnnnnnnnnnnnnnnnnnnnnnnnnnnnnnnnnnnnnnnnnnnnnnnnnnnnnnnnnnnnnnnnnnnnnnnnnnnnnnnnnnnnnnnnnnnnnnnnnnnnnnnnnnnnnnnnnnnnnnnnnnnnnnnnnnnnnnnnnnnnnnnnnnnnnnnnnnnnnnnnnnnnnnnnnnnnnnnnnnnnnnnnnnnnnnnnnnnnnnnnnnnnnnnnnnnnnnnnnnnnnnnnnnnnnnnnnnnnnnnnnnnnnnnnnnnnnnnnnnnnnnnnnnnnnnnnnnnnnnnnnnnnnnnnnnnnnnnnnnnnnnnnnnnnnnnnnnnnnnnnnnnnnnnnnnnnnnnnnnnnnnnnnnnnnnnnnnnnnnnnnnnnnnnnnnnnnnnnnnnnnnnnnnnnnnnnnnnnnnnnnnnnnnnnnnnnnnnnnnnnnnnnnnnnnnnnnnnnnnnnnnnnnnnnnnnnnnnnnnnnnnnnnnnnnnnnnnnnnnnnnnnnnnnnnnnnnnnnnnnnnnnnnnnnnnnnnnnnnnnnnnnnnnnnnnnnnnnnnnnnnnnnnnnnnnnnnnnnnnnnnnnnnnnnnnnnnnnnnnnnnnnnnnnnnnnnnnnnnnnnnnnnnnnnnnnnnnnnnnnnnnnnnnnnnnnnnnnnnnnnnnnnnnnnnnnnnnnnnnnnnnnnnnnnnnnnnnnnnnnnnnnnnnnnnnnnnnnnnnnnnnnnnnnnnnnnnnnnnnnnnnnnnnnnnnnnnnnnnnnnnnnnnnnnnnnnnnnnnnnnnnnnnnnnnnnnnnnnnnnnnnnnnnnnnnnnnnnnnnnnnnnnnnnnnnnnnnnnnnnnnnnnnnnnnnnnnnnnnnnnnnnnnnnnnnnnnnnnnnnnnnnnnnnnnnnnnnnnnnnnnnnnnnnnnnnnnnnnnnnnnnnnnnnnnnnnnnnnnnnnnnnnnnnnnnnnnnnnnnnnnnnnnnnnnnnnnnnnnnnnnnnnnnnnnnnnnnnnnnnnnnnnnnnnnnnnnnnnnnnnnnnnnnnnnnnnnnnnnnnnnnnnnnnnnnnnnnnnnnnnnnnnnnnnnnnnnnnnnnnnnnnnnnnnnnnnnnnnnnnnnnnnnnnnnnnnnnnnnnnnnnnnnnnnnnnnnnnnnnnnnnnnnnnnnnnnnnnnnnnnnnnnnnnnnnnnnnnnnnnnnnnnnnnnnnnnnnnnnnnnnnnnnnnnnnnnnnnnnnnnnnnnnnnnnnnnnnnnnnnnnnnnnnnnnnnnnnnnnnnnnnnnnnnnnnnnnnnnnnnnnnnnnnnnnnnnnnnnnnnnnnnnnnnnnnnnnnnnnnnnnnnnnnnnnnnnnnnnnnnnnnnnnnnnnnnnnnnnnnnnnnnnnnnnnnnnnnnnnnnnnnnnnnnnnnnnnnnnnnnnnnnnnnnnnnnnnnnnnnnnnnnnnnnnnnnnnnnnnnnnnnnnnnnnnnnnnnnnnnnnnnnnnnnnnnnnnnnnnnnnnnnnnnnnnnnnnnnnnnnnnnnnnnnnnnnnnnnnnnnnnnnnnnnnnnnnnnnnnnnnnnnnnnnnnnnnnnnnnnnnnnnnnnnnnnnnnnnnnnnnnnnnnnnnnnnnnnnnnnnnnnnnnnnnnnnnnnnnnnnnnnnnnnnnnnnnnnnnnnnnnnnnnnnnnnnnnnnnnnnnnnnnnnnnnnnnnnnnnnnnnnnnnnnnnnnnnnnnnnnnnnnnnnnnnnnnnnnnnnnnnnnnnnnnnnnnnnnnnnnnnnnnnnnnnnnnnnnnnnnnnnnnnnnnnnnnnnnnnnnnnnnnnnnnnnnnnnnnnnnnnnnnnnnnnnnnnnnnnnnnnnnnnnnnnnnnnnnnnnnnnnnnnnnnnnnnnnnnnnnnnnnnnnnnnnnnnnnnnnnnnnnnnnnnnnnnnnnnnnnnnnnnnnnnnnnnnnnnnnnnnnnnnnnnnnnnnnnnnnnnnnnnnnnnnnnnnnnnnnnnnnnnnnnnnnnnnnnnnnnnnnnnnnnnnnnnnnnnnnnnnnnnnnnnnnnnnnnnnnnnnnnnnnnnnnnnnnnnnnnnnnnnnnnnnnnnnnnnnnnnnnnnnnnnnnnnnnnnnnnnnnnnnnnnnnnnnnnnnnnnnnnnnnnnnnnnnnnnnnnnnnnnnnnnnnnnnnnnnnnnnnnnnnnnnnnnnnnnnnnnnnnnnnnnnnnnnnnnnnnnnnnnnnnnnnnnnnnnnnnnnnnnnnnnnnnnnnnnnnnnnnnnnnnnnnnnnnnnnnnnnnnnnnnnnnnnnnnnnnnnnnnnnnnnnnnnnnnnnnnnnnnnnnnnnnnnnnnnnnnnnnnnnnnnnnnnnnnnnnnnnnnnnnnnnnnnnnnnnnnnnnnnnnnnnnnnnnnnnnnnnnnnnnnnnnnnnnnnnnnnnnnnnnnnnnnnnnnnnnnnnnnnnnnnnnnnnnnnnnnnnnnnnnnnnnnnnnnnnnnnnnnnnnnnnnnnnnnnnnnnnnnnnnnnnnnnnnnnnnnnnnnnnnnnnnnnnnnnnnnnnnnnnnnnnnnnnnnnnnnnnnnnnnnnnnnnnnnnnnnnnnnnnnnnnnnnnnnnnnnnnnnnnnnnnnnnnnnnnnnnnnnnnnnnnnnnnnnnnnnnnnnnnnnnnnnnnnnnnnnnnnnnnnnnnnnnnnnnnnnnnnnnnnnnnnnnnnnnnnnnnnnnnnnnnnnnnnnnnnnnnnnnnnnnnnnnnnnnnnnnnnnnnnnnnnnnnnnnnnnnnnnnnnnnnnnnnnnnnnnnnnnnnnnnnnnnnnnnnnnnnnnnnnnnnnnnnnnnnnnnnnnnnnnnnnnnnnnnnnnnnnnnnnnnnnnnnnnnnnnnnnnnnnnnnnnnnnnnnnnnnnnnnnnnnnnnnnnnnnnnnnnnnnnnnnnnnnnnnnnnnnnnnnnnnnnnnnnnnnnnnnnnnnnnnnnnnnnnnnnnnnnnnnnnnnnnnnnnnnnnnnnnnnnnnnnnnnnnnnnnnnnnnnnnnnnnnnnnnnnnnnnnnnnnnnnnnnnnnnnnnnnnnnnnnnnnnnnnnnnnnnnnnnnnnnnnnnnnnnnnnnnnnnnnnnnnnnnnnnnnnnnnnnnnnnnnnnnnnnnnnnnnnnnnnnnnnnnnnnnnnnnnnnnnnnnnnnnnnnnnnnnnnnnnnnnnnnnnnnnnnnnnnnnnnnnnnnnnnnnnnnnnnnnnnnnnnnnnnnnnnnnnnnnnnnnnnnnnnnnnnnnnnnnnnnnnnnnnnnnnnnnnnnnnnnnnnnnnnnnnnnnnnnnnnnnnnnnnnnnnnnnnnnnnnnnnnnnnnnnnnnnnnnnnnnnnnnnnnnnnnnnnnnnnnnnnnnnnnnnnnnnnnnnnnnnnnnnnnnnnnnnnnnnnnnnnnnnnnnnnnnnnnnnnnnnnnnnnnnnnnnnnnnnnnnnnnnnnnnnnnnnnnnnnnnnnnnnnnnnnnnnnnnnnnnnnnnnnnnnnnnnnnnnnnnnnnnnnnnnnnnnnnnnnnnnnnnnnnnnnnnnnnnnnnnnnnnnnnnnnnnnnnnnnnnnnnnnnnnnnnnnnnnnnnnnnnnnnnnnnnnnnnnnnnnnnnnnnnnnnnnnnnnnnnnnnnnnnnnnnnnnnnnnnnnnnnnnnnnnnnnnnnnnnnnnnnnnnnnnnnnnnnnnnnnnnnnnnnnnnnnnnnnnnnnnnnnnnnnnnnnnnnnnnnnnnnnnnnnnnnnnnnnnnnnnnnnnnnnnnnnnnnnnnnnnnnnnnnnnnnnnnnnnnnnnnnnnnnnnnnnnnnnnnnnnnnnnnnnnnnnnnnnnnnnnnnnnnnnnnnnnnnnnnnnnnnnnnnnnnnnnnnnnnnnnnnnnnnnnnnnnnnnnnnnnnnnnnnnnnnnnnnnnnnnnnnnnnnnnnnnnnnnnnnnnnnnnnnnnnnnnnnnnnnnnnnnnnnnnnnnnnnnnnnnnnnnnnnnnnnnnnnnnnnnnnnnnnnnnnnnnnnnnnnnnnnnnnnnnnnnnnnnnnnnnnnnnnnnnnnnnnnnnnnnnnnnnnnnnnnnnnnnnnnnnnnnnnnnnnnnnnnnnnnnnnnnnnnnnnnnnnnnnnnnnnnnnnnnnnnnnnnnnnnnnnnnnnnnnnnnnnnnnnnnnnnnnnnnnnnnnnnnnnnnnnnnnnnnnnnnnnnnnnnnnnnnnnnnnnnnnnnnnnnnnnnnnnnnnnnnnnnnnnnnnnnnnnnnnnnnnnnnnnnnnnnnnnnnnnnnnnnnnnnnnnnnnnnnnnnnnnnnnnnnnnnnnnnnnnnnnnnnnnnnnnnnnnnnnnnnnnnnnnnnnnnnnnnnnnnnnnnnnnnnnnnnnnnnnnnnnnnnnnnnnnnnnnnnnnnnnnnnnnnnnnnnnnnnnnnnnnnnnnnnnnnnnnnnnnnnnnnnnnnnnnnnnnnnnnnnnnnnnnnnnnnnnnnnnnnnnnnnnnnnnnnnnnnnnnnnnnnnnnnnnnnnnnnnnnnnnnnnnnnnnnnnnnnnnnnnnnnnnnnnnnnnnnnnnnnnnnnnnnnnnnnnnnnnnnnnnnnnnnnnnnnnnnnnnnnnnnnnnnnnnnnnnnnnnnnnnnnnnnnnnnnnnnnnnnnnnnnnnnnnnnnnnnnnnnnnnnnnnnnnnnnnnnnnnnnnnnnnnnnnnnnnnnnnnnnnnnnnnnnnnnnnnnnnnnnnnnnnnnnnnnnnnnnnnnnnnnnnnnnnnnnnnnnnnnnnnnnnnnnnnnnnnnnnnnnnnnnnnnnnnnnnnnnnnnnnnnnnnnnnnnnnnnnnnnnnnnnnnnnnnnnnnnnnnnnnnnnnnnnnnnnnnnnnnnnnnnnnnnnnnnnnnnnnnnnnnnnnnnnnnnnnnnnnnnnnnnnnnnnnnnnnnnnnnnnnnnnnnnnnnnnnnnnnnnnnnnnnnnnnnnnnnnnnnnnnnnnnnnnnnnnnnnnnnnnnnnnnnnnnnnnnnnnnnnnnnnnnnnnnnnnnnnnnnnnnnnnnnnnnnnnnnnnnnnnnnnnnnnnnnnnnnnnnnnnnnnnnnnnnnnnnnnnnnnnnnnnnnnnnnnnnnnnnnnnnnnnnnnnnnnnnnnnnnnnnnnnnnnnnnnnnnnnnnnnnnnnnnnnnnnnnnnnnnnnnnnnnnnnnnnnnnnnnnnnnnnnnnnnnnnnnnnnnnnnnnnnnnnnnnnnnnnnnnnnnnnnnnnnnnnnnnnnnnnnnnnnnnnnnnnnnnnnnnnnnnnnnnnnnnnnnnnnnnnnnnnnnnnnnnnnnnnnnnnnnnnnnnnnnnnnnnnnnnnnnnnnnnnnnnnnnnnnnnnnnnnnnnnnnnnnnnnnnnnnnnnnnnnnnnnnnnnnnnnnnnnnnnnnnnnnnnnnnnnnnnnnnnnnnnnnnnnnnnnnnnnnnnnnnnnnnnnnnnnnnnnnnnnnnnnnnnnnnnnnnnnnnnnnnnnnnnnnnnnnnnnnnnnnnnnnnnnnnnnnnnnnnnnnnnnnnnnnnnnnnnnnnnnnnnnnnnnnnnnnnnnnnnnnnnnnnnnnnnnnnnnnnnnnnnnnnnnnnnnnnnnnnnnnnnnnnnnnnnnnnnnnnnnnnnnnnnnnnnnnnnnnnnnnnnnnnnnnnnnnnnnnnnnnnnnnnnnnnnnnnnnnnnnnnnnnnnnnnnnnnnnnnnnnnnnnnnnnnnnnnnnnnnnnnnnnnnnnnnnnnnnnnnnnnnnnnnnnnnnnnnnnnnnnnnnnnnnnnnnnnnnnnnnnnnnnnnnnnnnnnnnnnnnnnnnnnnnnnnnnnnnnnnnnnnnnnnnnnnnnnnnnnnnnnnnnnnnnnnnnnnnnnnnnnnnnnnnnnnnnnnnnnnnnnnnnnnnnnnnnnnnnnnnnnnnnnnnnnnnnnnnnnnnnnnnnnnnnnnnnnnnnnnnnnnnnnnnnnnnnnnnnnnnnnnnnnnnnnnnnnnnnnnnnnnnnnnnnnnnnnnnnnnnnnnnnnnnnnnnnnnnnnnnnnnnnnnnnnnnnnnnnnnnnnnnnnnnnnnnnnnnnnnnnnnnnnnnnnnnnnnnnnnnnnnnnnnnnnnnnnnnnnnnnnnnnnnnnnnnnnnnnnnnnnnnnnnnnnnnnnnnnnnnnnnnnnnnnnnnnnnnnnnnnnnnnnnnnnnnnnnnnnnnnnnnnnnnnnnnnnnnnnnnnnnnnnnnnnnnnnnnnnnnnnnnnnnnnnnnnnnnnnnnnnnnnnnnnnnnnnnnnnnnnnnnnnnnnnnnnnnnnnnnnnnnnnnnnnnnnnnnnnnnnnnnnnnnnnnnnnnnnnnnnnnnnnnnnnnnnnnnnnnnnnnnnnnnnnnnnnnnnnnnnnnnnnnnnnnnnnnnnnnnnnnnnnnnnnnnnnnnnnnnnnnnnnnnnnnnnnnnnnnnnnnnnnnnnnnnnnnnnnnnnnnnnnnnnnnnnnnnnnnnnnnnnnnnnnnnnnnnnnnnnnnnnnnnnnnnnnnnnnnnnnnnnnnnnnnnnnnnnnnnnnnnnnnnnnnnnnnnnnnnnnnnnnnnnnnnnnnnnnnnnnnnnnnnnnnnnnnnnnnnnnnnnnnnnnnnnnnnnnnnnnnnnnnnnnnnnnnnnnnnnnnnnnnnnnnnnnnnnnnnnnnnnnnnnnnnnnnnnnnnnnnnnnnnnnnnnnnnnnnnnnnnnnnnnnnnnnnnnnnnnnnnnnnnnnnnnnnnnnnnnnnnnnnnnnnnnnnnnnnnnnnnnnnnnnnnnnnnnnnnnnnnnnnnnnnnnnnnnnnnnnnnnnnnnnnnnnnnnnnnnnnnnnnnnnnnnnnnnnnnnnnnnnnnnnnnnnnnnnnnnnnnnnnnnnnnnnnnnnnnnnnnnnnnnnnnnnnnnnnnnnnnnnnnnnnnnnnnnnnnnnnnnnnnnnnnnnnnnnnnnnnnnnnnnnnnnnnnnnnnnnnnnnnnnnnnnnnnnnnnnnnnnnnnnnnnnnnnnnnnnnnnnnnnnnnnnnnnnnnnnnnnnnnnnnnnnnnnnnnnnnnnnnnnnnnnnnnnnnnnnnnnnnnnnnnnnnnnnnnnnnnnnnnnnnnnnnnnnnnnnnnnnnnnnnnnnnnnnnnnnnnnnnnnnnnnnnnnnnnnnnnnnnnnnnnnnnnnnnnnnnnnnnnnnnnnnnnnnnnnnnnnnnnnnnnnnnnnnnnnnnnnnnnnnnnnnnnnnnnnnnnnnnnnnnnnnnnnnnnnnnnnnnnnnnnnnnnnnnnnnnnnnnnnnnnnnnnnnnnnnnnnnnnnnnnnnnnnnnnnnnnnnnnnnnnnnnnnnnnnnnnnnnnnnnnnnnnnnnnnnnnnnnnnnnnnnnnnnnnnnnnnnnnnnnnnnnnnnnnnnnnnnnnnnnnnnnnnnnnnnnnnnnnnnnnnnnnnnnnnnnnnnnnnnnnnnnnnnnnnnnnnnnnnnnnnnnnnnnnnnnnnnnnnnnnnnnnnnnnnnnnnnnnnnnnnnnnnnnnnnnnnnnnnnnnnnnnnnnnnnnnnnnnnnnnnnnnnnnnnnnnnnnnnnnnnnnnnnnnnnnnnnnnnnnnnnnnnnnnnnnnnnnnnnnnnnnnnnnnnnnnnnnnnnnnnnnnnnnnnnnnnnnnnnnnnnnnnnnnnnnnnnnnnnnnnnnnnnnnnnnnnnnnnnnnnnnnnnnnnnnnnnnnnnnnnnnnnnnnnnnnnnnnnnnnnnnnnnnnnnnnnnnnnnnnnnnnnnnnnnnnnnnnnnnnnnnnnnnnnnnnnnnnnnnnnnnnnnnnnnnnnnnnnnnnnnnnnnnnnnnnnnnnnnnnnnnnnnnnnnnnnnnnnnnnnnnnnnnnnnnnnnnnnnnnnnnnnnnnnnnnnnnnnnnnnnnnnnnnnnnnnnnnnnnnnnnnnnnnnnnnnnnnnnnnnnnnnnnnnnnnnnnnnnnnnnnnnnnnnnnnnnnnnnnnnnnnnnnnnnnnnnnnnnnnnnnnnnnnnnnnnnnnnnnnnnnnnnnnnnnnnnnnnnnnnnnnnnnnnnnnnnnnnnnnnnnnnnnnnnnnnnnnnnnnnnnnnnnnnnnnnnnnnnnnnnnnnnnnnnnnnnnnnnnnnnnnnnnnnnnnnnnnnnnnnnnnnnnnnnnnnnnnnnnnnnnnnnnnnnnnnnnnnnnnnnnnnnnnnnnnnnnnnnnnnnnnnnnnnnnnnnnnnnnnnnnnnnnnnnnnnnnnnnnnnnnnnnnnnnnnnnnnnnnnnnnnnnnnnnnnnnnnnnnnnnnnnnnnnnnnnnnnnnnnnnnnnnnnnnnnnnnnnnnnnnnnnnnnnnnnnnnnnnnnnnnnnnnnnnnnnnnnnnnnnnnnnnnnnnnnnnnnnnnnnnnnnnnnnnnnnnnnnnnnnnnnnnnnnnnnnnnnnnnnnnnnnnnnnnnnnnnnnnnnnnnnnnnnnnnnnnnnnnnnnnnnnnnnnnnnnnnnnnnnnnnnnnnnnnnnnnnnnnnnnnnnnnnnnnnnnnnnnnnnnnnnnnnnnnnnnnnnnnnnnnnnnnnnnnnnnnnnnnnnnnnnnnnnnnnnnnnnnnnnnnnnnnnnnnnnnnnnnnnnnnnnnnnnnnnnnnnnnnnnnnnnnnnnnnnnnnnnnnnnnnnnnnnnnnnnnnnnnnnnnnnnnnnnnnnnnnnnnnnnnnnnnnnnnnnnnnnnnnnnnnnnnnnnnnnnnnnnnnnnnnnnnnnnnnnnnnnnnnnnnnnnnnnnnnnnnnnnnnnnnnnnnnnnnnnnnnnnnnnnnnnnnnnnnnnnnnnnnnnnnnnnnnnnnnnnnnnnnnnnnnnnnnnnnnnnnnnnnnnnnnnnnnnnnnnnnnnnnnnnnnnnnnnnnnnnnnnnnnnnnnnnnnnnnnnnnnnnnnnnnnnnnnnnnnnnnnnnnnnnnnnnnnnnnnnnnnnnnnnnnnnnnnnnnnnnnnnnnnnnnnnnnnnnnnnnnnnnnnnnnnnnnnnnnnnnnnnnnnnnnnnnnnnnnnnnnnnnnnnnnnnnnnnnnnnnnnnnnnnnnnnnnnnnnnnnnnnnnnnnnnnnnnnnnnnnnnnnnnnnnnnnnnnnnnnnnnnnnnnnnnnnnnnnnnnnnnnnnnnnnnnnnnnnnnnnnnnnnnnnnnnnnnnnnnnnnnnnnnnnnnnnnnnnnnnnnnnnnnnnnnnnnnnnnnnnnnnnnnnnnnnnnnnnnnnnnnnnnnnnnnnnnnnnnnnnnnnnnnnnnnnnnnnnnnnnnnnnnnnnnnnnnnnnnnnnnnnnnnnnnnnnnnnnnnnnnnnnnnnnnnnnnnnnnnnnnnnnnnnnnnnnnnnnnnnnnnnnnnnnnnnnnnnnnnnnnnnnnnnnnnnnnnnnnnnnnnnnnnnnnnnnnnnnnnnnnnnnnnnnnnnnnnnnnnnnnnnnnnnnnnnnnnnnnnnnnnnnnnnnnnnnnnnnnnnnnnnnnnnnnnnnnnnnnnnnnnnnnnnnnnnnnnnnnnnnnnnnnnnnnnnnnnnnnnnnnnnnnnnnnnnnnnnnnnnnnnnnnnnnnnnnnnnnnnnnnnnnnnnnnnnnnnnnnnnnnnnnnnnnnnnnnnnnnnnnnnnnnnnnnnnnnnnnnnnnnnnnnnnnnnnnnnnnnnnnnnnnnnnnnnnnnnnnnnnnnnnnnnnnnnnnnnnnnnnnnnnnnnnnnnnnnnnnnnnnnnnnnnnnnnnnnnnnnnnnnnnnnnnnnnnnnnnnnnnnnnnnnnnnnnnnnnnnnnnnnnnnnnnnnnnnnnnnnnnnnnnnnnnnnnnnnnnnnnnnnnnnnnnnnnnnnnnnnnnnnnnnnnnnnnnnnnnnnnnnnnnnnnnnnnnnnnnnnnnnnnnnnnnnnnnnnnnnnnnnnnnnnnnnnnnnnnnnnnnnnnnnnnnnnnnnnnnnnnnnnnnnnnnnnnnnnnnnnnnnnnnnnnnnnnnnnnnnnnnnnnnnnnnnnnnnnnnnnnnnnnnnnnnnnnnnnnnnnnnnnnnnnnnnnnnnnnnnnnnnnnnnnnnnnnnnnnnnnnnnnnnnnnnnnnnnnnnnnnnnnnnnnnnnnnnnnnnnnnnnnnnnnnnnnnnnnnnnnnnnnnnnnnnnnnnnnnnnnnnnnnnnnnnnnnnnnnnnnnnnnnnnnnnnnnnnnnnnnnnnnnnnnnnnnnnnnnnnnnnnnnnnnnnnnnnnnnnnnnnnnnnnnnnnnnnnnnnnnnnnnnnnnnnnnnnnnnnnnnnnnnnnnnnnnnnnnnnnnnnnnnnnnnnnnnnnnnnnnnnnnnnnnnnnnnnnnnnnnnnnnnnnnnnnnnnnnnnnnnnnnnnnnnnnnnnnnnnnnnnnnnnnnnnnnnnnnnnnnnnnnnnnnnnnnnnnnnnnnnnnnnnnnnnnnnnnnnnnnnnnnnnnnnnnnnnnnnnnnnnnnnnnnnnnnnnnnnnnnnnnnnnnnnnnnnnnnnnnnnnnnnnnnnnnnnnnnnnnnnnnnnnnnnnnnnnnnnnnnnnnnnnnnnnnnnnnnnnnnnnnnnnnnnnnnnnnnnnnnnnnnnnnnnnnnnnnnnnnnnnnnnnnnnnnnnnnnnnnnnnnnnnnnnnnnnnnnnnnnnnnnnnnnnnnnnnnnnnnnnnnnnnnnnnnnnnnnnnnnnnnnnnnnnnnnnnnnnnnnnnnnnnnnnnnnnnnnnnnnnnnnnnnnnnnnnnnnnnnnnnnnnnnnnnnnnnnnnnnnnnnnnnnnnnnnnnnnnnnnnnnnnnnnnnnnnnnnnnnnnnnnnnnnnnnnnnnnnnnnnnnnnnnnnnnnnnnnnnnnnnnnnnnnnnnnnnnnnnnnnnnnnnnnnnnnnnnnnnnnnnnnnnnnnnnnnnnnnnnnnnnnnnnnnnnnnnnnnnnnnnnnnnnnnnnnnnnnnnnnnnnnnnnnnnnnnnnnnnnnnnnnnnnnnnnnnnnnnnnnnnnnnnnnnnnnnnnnnnnnnnnnnnnnnnnnnnnnnnnnnnnnnnnnnnnnnnnnnnnnnnnnnnnnnnnnnnnnnnnnnnnnnnnnnnnnnnnnnnnnnnnnnnnnnnnnnnnnnnnnnnnnnnnnnnnnnnnnnnnnnnnnnnnnnnnnnnnnnnnnnnnnnnnnnnnnnnnnnnnnnnnnnnnnnnnnnnnnnnnnnnnnnnnnnnnnnnnnnnnnnnnnnnnnnnnnnnnnnnnnnnnnnnnnnnnnnnnnnnnnnnnnnnnnnnnnnnnnnnnnnnnnnnnnnnnnnnnnnnnnnnnnnnnnnnnnnnnnnnnnnnnnnnnnnnnnnnnnnnnnnnnnnnnnnnnnnnnnnnnnnnnnnnnnnnnnnnnnnnnnnnnnnnnnnnnnnnnnnnnnnnnnnnnnnnnnnnnnnnnnnnnnnnnnnnnnnnnnnnnnnnnnnnnnnnnnnnnnnnnnnnnnnnnnnnnnnnnnnnnnnnnnnnnnnnnnnnnnnnnnnnnnnnnnnnnnnnnnnnnnnnnnnnnnnnnnnnnnnnnnnnnnnnnnnnnnnnnnnnnnnnnnnnnnnnnnnnnnnnnnnnnnnnnnnnnnnnnnnnnnnnnnnnnnnnnnnnnnnnnnnnnnnnnnnnnnnnnnnnnnnnnnnnnnnnnnnnnnnnnnnnnnnnnnnnnnnnnnnnnnnnnnnnnnnnnnnnnnnnnnnnnnnnnnnnnnnnnnnnnnnnnnnnnnnnnnnnnnnnnnnnnnnnnnnnnnnnnnnnnnnnnnnnnnnnnnnnnnnnnnnnnnnnnnnnnnnnnnnnnnnnnnnnnnnnnnnnnnnnnnnnnnnnnnnnnnnnnnnnnnnnnnnnnnnnnnnnnnnnnnnnnnnnnnnnnnnnnnnnnnnnnnnnnnnnnnnnnnnnnnnnnnnnnnnnnnnnnnnnnnnnnnnnnnnnnnnnnnnnnnnnnnnnnnnnnnnnnnnnnnnnnnnnnnnnnnnnnnnnnnnnnnnnnnnnnnnnnnnnnnnnnnnnnnnnnnnnnnnnnnnnnnnnnnnnnnnnnnnnnnnnnnnnnnnnnnnnnnnnnnnnnnnnnnnnnnnnnnnnnnnnnnnnnnnnnnnnnnnnnnnnnnnnnnnnnnnnnnnnnnnnnnnnnnnnnnnnnnnnnnnnnnnnnnnnnnnnnnnnnnnnnnnnnnnnnnnnnnnnnnnnnnnnnnnnnnnnnnnnnnnnnnnnnnnnnnnnnnnnnnnnnnnnnnnnnnnnnnnnnnnnnnnnnnnnnnnnnnnnnnnnnnnnnnnnnnnnnnnnnnnnnnnnnnnnnnnnnnnnnnnnnnnnnnnnnnnnnnnnnnnnnnnnnnnnnnnnnnnnnnnnnnnnnnnnnnnnnnnnnnnnnnnnnnnnnnnnnnnnnnnnnnnnnnnnnnnnnnnnnnnnnnnnnnnnnnnnnnnnnnnnnnnnnnnnnnnnnnnnnnnnnnnnnnnnnnnnnnnnnnnnnnnnnnnnnnnnnnnnnnnnnnnnnnnnnnnnnnnnnnnnnnnnnnnnnnnnnnnnnnnnnnnnnnnnnnnnnnnnnnnnnnnnnnnnnnnnnnnnnnnnnnnnnnnnnnnnnnnnnnnnnnnnnnnnnnnnnnnnnnnnnnnnnnnnnnnnnnnnnnnnnnnnnnnnnnnnnnnnnnnnnnnnnnnnnnnnnnnnnnnnnnnnnnnnnnnnnnnnnnnnnnnnnnnnnnnnnnnnnnnnnnnnnnnnnnnnnnnnnnnnnnnnnnnnnnnnnnnnnnnnnnnnnnnnnnnnnnnnnnnnnnnnnnnnnnnnnnnnnnnnnnnnnnnnnnnnnnnnnnnnnnnnnnnnnnnnnnnnnnnnnnnnnnnnnnnnnnnnnnnnnnnnnnnnnnnnnnnnnnnnnnnnnnnnnnnnnnnnnnnnnnnnnnnnnnnnnnnnnnnnnnnnnnnnnnnnnnnnnnnnnnnnnnnnnnnnnnnnnnnnnnnnnnnnnnnnnnnnnnnnnnnnnnnnnnnnnnnnnnnnnnnnnnnnnnnnnnnnnnnnnnnnnnnnnnnnnnnnnnnnnnnnnnnnnnnnnnnnnnnnnnnnnnnnnnnnnnnnnnnnnnnnnnnnnnnnnnnnnnnnnnnnnnnnnnnnnnnnnnnnnnnnnnnnnnnnnnnnnnnnnnnnnnnnnnnnnnnnnnnnnnnnnnnnnnnnnnnnnnnnnnnnnnnnnnnnnnnnnnnnnnnnnnnnnnnnnnnnnnnnnnnnnnnnnnnnnnnnnnnnnnnnnnnnnnnnnnnnnnnnnnnnnnnnnnnnnnnnnnnnnnnnnnnnnnnnnnnnnnnnnnnnnnnnnnnnnnnnnnnnnnnnnnnnnnnnnnnnnnnnnnnnnnnnnnnnnnnnnnnnnnnnnnnnnnnnnnnnnnnnnnnnnnnnnnnnnnnnnnnnnnnnnnnnnnnnnnnnnnnnnnnnnnnnnnnnnnnnnnnnnnnnnnnnnnnnnnnnnnnnnnnnnnnnnnnnnnnnnnnnnnnnnnnnnnnnnnnnnnnnnnnnnnnnnnnnnnnnnnnnnnnnnnnnnnnnnnnnnnnnnnnnnnnnnnnnnnnnnnnnnnnnnnnnnnnnnnnnnnnnnnnnnnnnnnnnnnnnnnnnnnnnnnnnnnnnnnnnnnnnnnnnnnnnnnnnnnnnnnnnnnnnnnnnnnnnnnnnnnnnnnnnnnnnnnnnnnnnnnnnnnnnnnnnnnnnnnnnnnnnnnnnnnnnnnnnnnnnnnnnnnnnnnnnnnnnnnnnnnnnnnnnnnnnnnnnnnnnnnnnnnnnnnnnnnnnnnnnnnnnnnnnnnnnnnnnnnnnnnnnnnnnnnnnnnnnnnnnnnnnnnnnnnnnnnnnnnnnnnnnnnnnnnnnnnnnnnnnnnnnnnnnnnnnnnnnnnnnnnnnnnnnnnnnnnnnnnnnnnnnnnnnnnnnnnnnnnnnnnnnnnnnnnnnnnnnnnnnnnnnnnnnnnnnnnnnnnnnnnnnnnnnnnnnnnnnnnnnnnnnnnnnnnnnnnnnnnnnnnnnnnnnnnnnnnnnnnnnnnnnnnnnnnnnnnnnnnnnnnnnnnnnnnnnnnnnnnnnnnnnnnnnnnnnnnnnnnnnnnnnnnnnnnnnnnnnnnnnnnnnnnnnnnnnnnnnnnnnnnnnnnnnnnnnnnnnnnnnnnnnnnnnnnnnnnnnnnnnnnnnnnnnnnnnnnnnnnnnnnnnnnnnnnnnnnnnnnnnnnnnnnnnnnnnnnnnnnnnnnnnnnnnnnnnnnnnnnnnnnnnnnnnnnnnnnnnnnnnnnnnnnnnnnnnnnnnnnnnnnnnnnnnnnnnnnnnnnnnnnnnnnnnnnnnnnnnnnnnnnnnnnnnnnnnnnnnnnnnnnnnnnnnnnnnnnnnnnnnnnnnnnnnnnnnnnnnnnnnnnnnnnnnnnnnnnnnnnnnnnnnnnnnnnnnnnnnnnnnnnnnnnnnnnnnnnnnnnnnnnnnnnnnnnnnnnnnnnnnnnnnnnnnnnnnnnnnnnnnnnnnnnnnnnnnnnnnnnnnnnnnnnnnnnnnnnnnnnnnnnnnnnnnnnnnnnnnnnnnnnnnnnnnnnnnnnnnnnnnnnnnnnnnnnnnnnnnnnnnnnnnnnnnnnnnnnnnnnnnnnnnnnnnnnnnnnnnnnnnnnnnnnnnnnnnnnnnnnnnnnnnnnnnnnnnnnnnnnnnnnnnnnnnnnnnnnnnnnnnnnnnnnnnnnnnnnnnnnnnnnnnnnnnnnnnnnnnnnnnnnnnnnnnnnnnnnnnnnnnnnnnnnnnnnnnnnnnnnnnnnnnnnnnnnnnnnnnnnnnnnnnnnnnnnnnnnnnnnnnnnnnnnnnnnnnnnnnnnnnnnnnnnnnnnnnnnnnnnnnnnnnnnnnnnnnnnnnnnnnnnnnnnnnnnnnnnnnnnnnnnnnnnnnnnnnnnnnnnnnnnnnnnnnnnnnnnnnnnnnnnnnnnnnnnnnnnnnnnnnnnnnnnnnnnnnnnnnnnnnnnnnnnnnnnnnnnnnnnnnnnnnnnnnnnnnnnnnnnnnnnnnnnnnnnnnnnnnnnnnnnnnnnnnnnnnnnnnnnnnnnnnnnnnnnnnnnnnnnnnnnnnnnnnnnnnnnnnnnnnnnnnnnnnnnnnnnnnnnnnnnnnnnnnnnnnnnnnnnnnnnnnnnnnnnnnnnnnnnnnnnnnnnnnnnnnnnnnnnnnnnnnnnnnnnnnnnnnnnnnnnnnnnnnnnnnnnnnnnnnnnnnnnnnnnnnnnnnnnnnnnnnnnnnnnnnnnnnnnnnnnnnnnnnnnnnnnnnnnnnnnnnnnnnnnnnnnnnnnnnnnnnnnnnnnnnnnnnnnnnnnnnnnnnnnnnnnnnnnnnnnnnnnnnnnnnnnnnnnnnnnnnnnnnnnnnnnnnnnnnnnnnnnnnnnnnnnnnnnnnnnnnnnnnnnnnnnnnnnnnnnnnnnnnnnnnnnnnnnnnnnnnnnnnnnnnnnnnnnnnnnnnnnnnnnnnnnnnnnnnnnnnnnnnnnnnnnnnnnnnnnnnnnnnnnnnnnnnnnnnnnnnnnnnnnnnnnnnnnnnnnnnnnnnnnnnnnnnnnnnnnnnnnnnnnnnnnnnnnnnnnnnnnnnnnnnnnnnnnnnnnnnnnnnnnnnnnnnnnnnnnnnnnnnnnnnnnnnnnnnnnnnnnnnnnnnnnnnnnnnnnnnnnnnnnnnnnnnnnnnnnnnnnnnnnnnnnnnnnnnnnnnnnnnnnnnnnnnnnnnnnnnnnnnnnnnnnnnnnnnnnnnnnnnnnnnnnnnnnnnnnnnnnnnnnnnnnnnnnnnnnnnnnnnnnnnnnnnnnnnnnnnnnnnnnnnnnnnnnnnnnnnnnnnnnnnnnnnnnnnnnnnnnnnnnnnnnnnnnnnnnnnnnnnnnnnnnnnnnnnnnnnnnnnnnnnnnnnnnnnnnnnnnnnnnnnnnnnnnnnnnnnnnnnnnnnnnnnnnnnnnnnnnnnnnnnnnnnnnnnnnnnnnnnnnnnnnnnnnnnnnnnnnnnnnnnnnnnnnnnnnnnnnnnnnnnnnnnnnnnnnnnnnnnnnnnnnnnnnnnnnnnnnnnnnnnnnnnnnnnnnnnnnnnnnnnnnnnnnnnnnnnnnnnnnnnnnnnnnnnnnnnnnnnnnnnnnnnnnnnnnnnnnnnnnnnnnnnnnnnnnnnnnnnnnnnnnnnnnnnnnnnnnnnnnnnnnnnnnnnnnnnnnnnnnnnnnnnnnnnnnnnnnnnnnnnnnnnnnnnnnnnnnnnnnnnnnnnnnnnnnnnnnnnnnnnnnnnnnnnnnnnnnnnnnnnnnnnnnnnnnnnnnnnnnnnnnnnnnnnnnnnnnnnnnnnnnnnnnnnnnnnnnnnnnnnnnnnnnnnnnnnnnnnnnnnnnnnnnnnnnnnnnnnnnnnnnnnnnnnnnnnnnnnnnnnnnnnnnnnnnnnnnnnnnnnnnnnnnnnnnnnnnnnnnnnnnnnnnnnnnnnnnnnnnnnnnnnnnnnnnnnnnnnnnnnnnnnnnnnnnnnnnnnnnnnnnnnnnnnnnnnnnnnnnnnnnnnnnnnnnnnnnnnnnnnnnnnnnnnnnnnnnnnnnnnnnnnnnnnnnnnnnnnnnnnnnnnnnnnnnnnnnnnnnnnnnnnnnnnnnnnnnnnnnnnnnnnnnnnnnnnnnnnnnnnnnnnnnnnnnnnnnnnnnnnnnnnnnnnnnnnnnnnnnnnnnnnnnnnnnnnnnnnnnnnnnnnnnnnnnnnnnnnnnnnnnnnnnnnnnnnnnnnnnnnnnnnnnnnnnnnnnnnnnnnnnnnnnnnnnnnnnnnnnnnnnnnnnnnnnnnnnnnnnnnnnnnnnnnnnnnnnnnnnnnnnnnnnnnnnnnnnnnnnnnnnnnnnnnnnnnnnnnnnnnnnnnnnnnnnnnnnnnnnnnnnnnnnnnnnnnnnnnnnnnnnnnnnnnnnnnnnnnnnnnnnnnnnnnnnnnnnnnnnnnnnnnnnnnnnnnnnnnnnnnnnnnnnnnnnnnnnnnnnnnnnnnnnnnnnnnnnnnnnnnnnnnnnnnnnnnnnnnnnnnnnnnnnnnnnnnnnnnnnnnnnnnnnnnnnnnnnnnnnnnnnnnnnnnnnnnnnnnnnnnnnnnnnnnnnnnnnnnnnnnnnnnnnnnnnnnnnnnnnnnnnnnnnnnnnnnnnnnnnnnnnnnnnnnnnnnnnnnnnnnnnnnnnnnnnnnnnnnnnnnnnnnnnnnnnnnnnnnnnnnnnnnnnnnnnnnnnnnnnnnnnnnnnnnnnnnnnnnnnnnnnnnnnnnnnnnnnnnnnnnnnnnnnnnnnnnnnnnnnnnnnnnnnnnnnnnnnnnnnnnnnnnnnnnnnnnnnnnnnnnnnnnnnnnnnnnnnnnnnnnnnnnnnnnnnnnnnnnnnnnnnnnnnnnnnnnnnnnnnnnnnnnnnnnnnnnnnnnnnnnnnnnnnnnnnnnnnnnnnnnnnnnnnnnnnnnnnnnnnnnnnnnnnnnnnnnnnnnnnnnnnnnnnnnnnnnnnnnnnnnnnnnnnnnnnnnnnnnnnnnnnnnnnnnnnnnnnnnnnnnnnnnnnnnnnnnnnnnnnnnnnnnnnnnnnnnnnnnnnnnnnnnnnnnnnnnnnnnnnnnnnnnnnnnnnnnnnnnnnnnnnnnnnnnnnnnnnnnnnnnnnnnnnnnnnnnnnnnnnnnnnnnnnnnnnnnnnnnnnnnnnnnnnnnnnnnnnnnnnnnnnnnnnnnnnnnnnnnnnnnnnnnnnnnnnnnnnnnnnnnnnnnnnnnnnnnnnnnnnnnnnnnnnnnnnnnnnnnnnnnnnnnnnnnnnnnnnnnnnnnnnnnnnnnnnnnnnnnnnnnnnnnnnnnnnnnnnnnnnnnnnnnnnnnnnnnnnnnnnnnnnnnnnnnnnnnnnnnnnnnnnnnnnnnnnnnnnnnnnnnnnnnnnnnnnnnnnnnnnnnnnnnnnnnnnnnnnnnnnnnnnnnnnnnnnnnnnnnnnnnnnnnnnnnnnnnnnnnnnnnnnnnnnnnnnnnnnnnnnnnnnnnnnnnnnnnnnnnnnnnnnnnnnnnnnnnnnnnnnnnnnnnnnnnnnnnnnnnnnnnnnnnnnnnnnnnnnnnnnnnnnnnnnnnnnnnnnnnnnnnnnnnnnnnnnnnnnnnnnnnnnnnnnnnnnnnnnnnnnnnnnnnnnnnnnnnnnnnnnnnnnnnnnnnnnnnnnnnnnnnnnnnnnnnnnnnnnnnnnnnnnnnnnnnnnnnnnnnnnnnnnnnnnnnnnnnnnnnnnnnnnnnnnnnnnnnnnnnnnnnnnnnnnnnnnnnnnnnnnnnnnnnnnnnnnnnnnnnnnnnnnnnnnnnnnnnnnnnnnnnnnnnnnnnnnnnnnnnnnnnnnnnnnnnnnnnnnnnnnnnnnnnnnnnnnnnnnnnnnnnnnnnnnnnnnnnnnnnnnnnnnnnnnnnnnnnnnnnnnnnnnnnnnnnnnnnnnnnnnnnnnnnnnnnnnnnnnnnnnnnnnnnnnnnnnnnnnnnnnnnnnnnnnnnnnnnnnnnnnnnnnnnnnnnnnnnnnnnnnnnnnnnnnnnnnnnnnnnnnnnnnnnnnnnnnnnnnnnnnnnnnnnnnnnnnnnnnnnnnnnnnnnnnnnnnnnnnnnnnnnnnnnnnnnnnnnnnnnnnnnnnnnnnnnnnnnnnnnnnnnnnnnnnnnnnnnnnnnnnnnnnnnnnnnnnnnnnnnnnnnnnnnnnnnnnnnnnnnnnnnnnnnnnnnnnnnnnnnnnnnnnnnnnnnnnnnnnnnnnnnnnnnnnnnnnnnnnnnnnnnnnnnnnnnnnnnnnnnnnnnnnnnnnnnnnnnnnnnnnnnnnnnnnnnnnnnnnnnnnnnnnnnnnnnnnnnnnnnnnnnnnnnnnnnnnnnnnnnnnnnnnnnnnnnnnnnnnnnnnnnnnnnnnnnnnnnnnnnnnnnnnnnnnnnnnnnnnnnnnnnnnnnnnnnnnnnnnnnnnnnnnnnnnnnnnnnnnnnnnnnnnnnnnnnnnnnnnnnnnnnnnnnnnnnnnnnnnnnnnnnnnnnnnnnnnnnnnnnnnnnnnnnnnnnnnnnnnnnnnnnnnnnnnnnnnnnnnnnnnnnnnnnnnnnnnnnnnnnnnnnnnnnnnnnnnnnnnnnnnnnnnnnnnnnnnnnnnnnnnnnnnnnnnnnnnnnnnnnnnnnnnnnnnnnnnnnnnnnnnnnnnnnnnnnnnnnnnnnnnnnnnnnnnnnnnnnnnnnnnnnnnnnnnnnnnnnnnnnnnnnnnnnnnnnnnnnnnnnnnnnnnnnnnnnnnnnnnnnnnnnnnnnnnnnnnnnnnnnnnnnnnnnnnnnnnnnnnnnnnnnnnnnnnnnnnnnnnnnnnnnnnnnnnnnnnnnnnnnnnnnnnnnnnnnnnnnnnnnnnnnnnnnnnnnnnnnnnnnnnnnnnnnnnnnnnnnnnnnnnnnnnnnnnnnnnnnnnnnnnnnnnnnnnnnnnnnnnnnnnnnnnnnnnnnnnnnnnnnnnnnnnnnnnnnnnnnnnnnnnnnnnnnnnnnnnnnnnnnnnnnnnnnnnnnnnnnnnnnnnnnnnnnnnnnnnnnnnnnnnnnnnnnnnnnnnnnnnnnnnnnnnnnnnnnnnnnnnnnnnnnnnnnnnnnnnnnnnnnnnnnnnnnnnnnnnnnnnnnnnnnnnnnnnnnnnnnnnnnnnnnnnnnnnnnnnnnnnnnnnnnnnnnnnnnnnnnnnnnnnnnnnnnnnnnnnnnnnnnnnnnnnnnnnnnnnnnnnnnnnnnnnnnnnnnnnnnnnnnnnnnnnnnnnnnnnnnnnnnnnnnnnnnnnnnnnnnnnnnnnnnnnnnnnnnnnnnnnnnnnnnnnnnnnnnnnnnnnnnnnnnnnnnnnnnnnnnnnnnnnnnnnnnnnnnnnnnnnnnnnnnnnnnnnnnnnnnnnnnnnnnnnnnnnnnnnnnnnnnnnnnnnnnnnnnnnnnnnnnnnnnnnnnnnnnnnnnnnnnnnnnnnnnnnnnnnnnnnnnnnnnnnnnnnnnnnnnnnnnnnnnnnnnnnnnnnnnnnnnnnnnnnnnnnnnnnnnnnnnnnnnnnnnnnnnnnnnnnnnnnnnnnnnnnnnnnnnnnnnnnnnnnnnnnnnnnnnnnnnnnnnnnnnnnnnnnnnnnnnnnnnnnnnnnnnnnnnnnnnnnnnnnnnnnnnnnnnnnnnnnnnnnnnnnnnnnnnnnnnnnnnnnnnnnnnnnnnnnnnnnnnnnnnnnnnnnnnnnnnnnnnnnnnnnnnnnnnnnnnnnnnnnnnnnnnnnnnnnnnnnnnnnnnnnnnnnnnnnnnnnnnnnnnnnnnnnnnnnnnnnnnnnnnnnnnnnnnnnnnnnnnnnnnnnnnnnnnnnnnnnnnnnnnnnnnnnnnnnnnnnnnnnnnnnnnnnnnnnnnnnnnnnnnnnnnnnnnnnnnnnnnnnnnnnnnnnnnnnnnnnnnnnnnnnnnnnnnnnnnnnnnnnnnnnnnnnnnnnnnnnnnnnnnnnnnnnnnnnnnnnnnnnnnnnnnnnnnnnnnnnnnnnnnnnnnnnnnnnnnnnnnnnnnnnnnnnnnnnnnnnnnnnnnnnnnnnnnnnnnnnnnnnnnnnnnnnnnnnnnnnnnnnnnnnnnnnnnnnnnnnnnnnnnnnnnnnnnnnnnnnnnnnnnnnnnnnnnnnnnnnnnnnnnnnnnnnnnnnnnnnnnnnnnnnnnnnnnnnnnnnnnnnnnnnnnnnnnnnnnnnnnnnnnnnnnnnnnnnnnnnnnnnnnnnnnnnnnnnnnnnnnnnnnnnnnnnnnnnnnnnnnnnnnnnnnnnnnnnnnnnnnnnnnnnnnnnnnnnnnnnnnnnnnnnnnnnnnnnnnnnnnnnnnnnnnnnnnnnnnnnnnnnnnnnnnnnnnnnnnnnnnnnnnnnnnnnnnnnnnnnnnnnnnnnnnnnnnnnnnnnnnnnnnnnnnnnnnnnnnnnnnnnnnnnnnnnnnnnnnnnnnnnnnnnnnnnnnnnnnnnnnnnnnnnnnnnnnnnnnnnnnnnnnnnnnnnnnnnnnnnnnnnnnnnnnnnnnnnnnnnnnnnnnnnnnnnnnnnnnnnnnnnnnnnnnnnnnnnnnnnnnnnnnnnnnnnnnnnnnnnnnnnnnnnnnnnnnnnnnnnnnnnnnnnnnnnnnnnnnnnnnnnnnnnnnnnnnnnnnnnnnnnnnnnnnnnnnnnnnnnnnnnnnnnnnnnnnnnnnnnnnnnnnnnnnnnnnnnnnnnnnnnnnnnnnnnnnnnnnnnnnnnnnnnnnnnnnnnnnnnnnnnnnnnnnnnnnnnnnnnnnnnnnnnnnnnnnnnnnnnnnnnnnnnnnnnnnnnnnnnnnnnnnnnnnnnnnnnnnnnnnnnnnnnnnnnnnnnnnnnnnnnnnnnnnnnnnnnnnnnnnnnnnnnnnnnnnnnnnnnnnnnnnnnnnnnnnnnnnnnnnnnnnnnnnnnnnnnnnnnnnnnnnnnnnnnnnnnnnnnnnnnnnnnnnnnnnnnnnnnnnnnnnnnnnnnnnnnnnnnnnnnnnnnnnnnnnnnnnnnnnnnnnnnnnnnnnnnnnnnnnnnnnnnnnnnnnnnnnnnnnnnnnnnnnnnnnnnnnnnnnnnnnnnnnnnnnnnnnnnnnnnnnnnnnnnnnnnnnnnnnnnnnnnnnnnnnnnnnnnnnnnnnnnnnnnnnnnnnnnnnnnnnnnnnnnnnnnnnnnnnnnnnnnnnnnnnnnnnnnnnnnnnnnnnnnnnnnnnnnnnnnnnnnnnnnnnnnnnnnnnnnnnnnnnnnnnnnnnnnnnnnnnnnnnnnnnnnnnnnnnnnnnnnnnnnnnnnnnnnnnnnnnnnnnnnnnnnnnnnnnnnnnnnnnnnnnnnnnnnnnnnnnnnnnnnnnnnnnnnnnnnnnnnnnnnnnnnnnnnnnnnnnnnnnnnnnnnnnnnnnnnnnnnnnnnnnnnnnnnnnnnnnnnnnnnnnnnnnnnnnnnnnnnnnnnnnnnnnnnnnnnnnnnnnnnnnnnnnnnnnnnnnnnnnnnnnnnnnnnnnnnnnnnnnnnnnnnnnnnnnnnnnnnnnnnnnnnnnnnnnnnnnnnnnnnnnnnnnnnnnnnnnnnnnnnnnnnnnnnnnnnnnnnnnnnnnnnnnnnnnnnnnnnnnnnnnnnnnnnnnnnnnnnnnnnnnnnnnnnnnnnnnnnnnnnnnnnnnnnnnnnnnnnnnnnnnnnnnnnnnnnnnnnnnnnnnnnnnnnnnnnnnnnnnnnnnnnnnnnnnnnnnnnnnnnnnnnnnnnnnnnnnnnnnnnnnnnnnnnnnnnnnnnnnnnnnnnnnnnnnnnnnnnnnnnnnnnnnnnnnnnnnnnnnnnnnnnnnnnnnnnnnnnnnnnnnnnnnnnnnnnnnnnnnnnnnnnnnnnnnnnnnnnnnnnnnnnnnnnnnnnnnnnnnnnnnnnnnnnnnnnnnnnnnnnnnnnnnnnnnnnnnnnnnnnnnnnnnnnnnnnnnnnnnnnnnnnnnnnnnnnnnnnnnnnnnnnnnnnnnnnnnnnnnnnnnnnnnnnnnnnnnnnnnnnnnnnnnnnnnnnnnnnnnnnnnnnnnnnnnnnnnnnnnnnnnnnnnnnnnnnnnnnnnnnnnnnnnnnnnnnnnnnnnnnnnnnnnnnnnnnnnnnnnnnnnnnnnnnnnnnnnnnnnnnnnnnnnnnnnnnnnnnnnnnnnnnnnnnnnnnnnnnnnnnnnnnnnnnnnnnnnnnnnnnnnnnnnnnnnnnnnnnnnnnnnnnnnnnnnnnnnnnnnnnnnnnnnnnnnnnnnnnnnnnnnnnnnnnnnnnnnnnnnnnnnnnnnnnnnnnnnnnnnnnnnnnnnnnnnnnnnnnnnnnnnnnnnnnnnnnnnnnnnnnnnnnnnnnnnnnnnnnnnnnnnnnnnnnnnnnnnnnnnnnnnnnnnnnnnnnnnnnnnnnnnnnnnnnnnnnnnnnnnnnnnnnnnnnnnnnnnnnnnnnnnnnnnnnnnnnnnnnnnnnnnnnnnnnnnnnnnnnnnnnnnnnnnnnnnnnnnnnnnnnnnnnnnnnnnnnnnnnnnnnnnnnnnnnnnnnnnnnnnnnnnnnnnnnnnnnnnnnnnnnnnnnnnnnnnnnnnnnnnnnnnnnnnnnnnnnnnnnnnnnnnnnnnnnnnnnnnnnnnnnnnnnnnnnnnnnnnnnnnnnnnnnnnnnnnnnnnnnnnnnnnnnnnnnnnnnnnnnnnnnnnnnnnnnnnnnnnnnnnnnnnnnnnnnnnnnnnnnnnnnnnnnnnnnnnnnnnnnnnnnnnnnnnnnnnnnnnnnnnnnnnnnnnnnnnnnnnnnnnnnnnnnnnnnnnnnnnnnnnnnnnnnnnnnnnnnnnnnnnnnnnnnnnnnnnnnnnnnnnnnnnnnnnnnnnnnnnnnnnnnnnnnnnnnnnnnnnnnnnnnnnnnnnnnnnnnnnnnnnnnnnnnnnnnnnnnnnnnnnnnnnnnnnnnnnnnnnnnnnnnnnnnnnnnnnnnnnnnnnnnnnnnnnnnnnnnnnnnnnnnnnnnnnnnnnnnnnnnnnnnnnnnnnnnnnnnnnnnnnnnnnnnnnnnnnnnnnnnnnnnnnnnnnnnnnnnnnnnnnnnnnnnnnnnnnnnnnnnnnnnnnnnnnnnnnnnnnnnnnnnnnnnnnnnnnnnnnnnnnnnnnnnnnnnnnnnnnnnnnnnnnnnnnnnnnnnnnnnnnnnnnnnnnnnnnnnnnnnnnnnnnnnnnnnnnnnnnnnnnnnnnnnnnnnnnnnnnnnnnnnnnnnnnnnnnnnnnnnnnnnnnnnnnnnnnnnnnnnnnnnnnnnnnnnnnnnnnnnnnnnnnnnnnnnnnnnnnnnnnnnnnnnnnnnnnnnnnnnnnnnnnnnnnnnnnnnnnnnnnnnnnnnnnnnnnnnnnnnnnnnnnnnnnnnnnnnnnnnnnnnnnnnnnnnnnnnnnnnnnnnnnnnnnnnnnnnnnnnnnnnnnnnnnnnnnnnnnnnnnnnnnnnnnnnnnnnnnnnnnnnnnnnnnnnnnnnnnnnnnnnnnnnnnnnnnnnnnnnnnnnnnnnnnnnnnnnnnnnnnnnnnnnnnnnnnnnnnnnnnnnnnnnnnnnnnnnnnnnnnnnnnnnnnnnnnnnnnnnnnnnnnnnnnnnnnnnnnnnnnnnnnnnnnnnnnnnnnnnnnnnnnnnnnnnnnnnnnnnnnnnnnnnnnnnnnnnnnnnnnnnnnnnnnnnnnnnnnnnnnnnnnnnnnnnnnnnnnnnnnnnnnnnnnnnnnnnnnnnnnnnnnnnnnnnnnnnnnnnnnnnnnnnnnnnnnnnnnnnnnnnnnnnnnnnnnnnnnnnnnnnnnnnnnnnnnnnnnnnnnnnnnnnnnnnnnnnnnnnnnnnnnnnnnnnnnnnnnnnnnnnnnnnnnnnnnnnnnnnnnnnnnnnnnnnnnnnnnnnnnnnnnnnnnnnnnnnnnnnnnnnnnnnnnnnnnnnnnnnnnnnnnnnnnnnnnnnnnnnnnnnnnnnnnnnnnnnnnnnnnnnnnnnnnnnnnnnnnnnnnnnnnnnnnnnnnnnnnnnnnnnnnnnnnnnnnnnnnnnnnnnnnnnnnnnnnnnnnnnnnnnnnnnnnnnnnnnnnnnnnnnnnnnnnnnnnnnnnnnnnnnnnnnnnnnnnnnnnnnnnnnnnnnnnnnnnnnnnnnnnnnnnnnnnnnnnnnnnnnnnnnnnnnnnnnnnnnnnnnnnnnnnnnnnnnnnnnnnnnnnnnnnnnnnnnnnnnnnnnnnnnnnnnnnnnnnnnnnnnnnnnnnnnnnnnnnnnnnnnnnnnnnnnnnnnnnnnnnnnnnnnnnnnnnnnnnnnnnnnnnnnnnnnnnnnnnnnnnnnnnnnnnnnnnnnnnnnnnnnnnnnnnnnnnnnnnnnnnnnnnnnnnnnnnnnnnnnnnnnnnnnnnnnnnnnnnnnnnnnnnnnnnnnnnnnnnnnnnnnnnnnnnnnnnnnnnnnnnnnnnnnnnnnnnnnnnnnnnnnnnnnnnnnnnnnnnnnnnnnnnnnnnnnnnnnnnnnnnnnnnnnnnnnnnnnnnnnnnnnnnnnnnnnnnnnnnnnnnnnnnnnnnnnnnnnnnnnnnnnnnnnnnnnnnnnnnnnnnnnnnnnnnnnnnnnnnnnnnnnnnnnnnnnnnnnnnnnnnnnnnnnnnnnnnnnnnnnnnnnnnnnnnnnnnnnnnnnnnnnnnnnnnnnnnnnnnnnnnnnnnnnnnnnnnnnnnnnnnnnnnnnnnnnnnnnnnnnnnnnnnnnnnnnnnnnnnnnnnnnnnnnnnnnnnnnnnnnnnnnnnnnnnnnnnnnnnnnnnnnnnnnnnnnnnnnnnnnnnnnnnnnnnnnnnnnnnnnnnnnnnnnnnnnnnnnnnnnnnnnnnnnnnnnnnnnnnnnnnnnnnnnnnnnnnnnnnnnnnnnnnnnnnnnnnnnnnnnnnnnnnnnnnnnnnnnnnnnnnnnnnnnnnnnnnnnnnnnnnnnnnnnnnnnnnnnnnnnnnnnnnnnnnnnnnnnnnnnnnnnnnnnnnnnnnnnnnnnnnnnnnnnnnnnnnnnnnnnnnnnnnnnnnnnnnnnnnnnnnnnnnnnnnnnnnnnnnnnnnnnnnnnnnnnnnnnnnnnnnnnnnnnnnnnnnnnnnnnnnnnnnnnnnnnnnnnnnnnnnnnnnnnnnnnnnnnnnnnnnnnnnnnnnnnnnnnnnnnnnnnnnnnnnnnnnnnnnnnnnnnnnnnnnnnnnnnnnnnnnnnnnnnnnnnnnnnnnnnnnnnnnnnnnnnnnnnnnnnnnnnnnnnnnnnnnnnnnnnnnnnnnnnnnnnnnnnnnnnnnnnnnnnnnnnnnnnnnnnnnnnnnnnnnnnnnnnnnnnnnnnnnnnnnnnnnnnnnnnnnnnnnnnnnnnnnnnnnnnnnnnnnnnnnnnnnnnnnnnnnnnnnnnnnnnnnnnnnnnnnnnnnnnnnnnnnnnnnnnnnnnnnnnnnnnnnnnnnnnnnnnnnnnnnnnnnnnnnnnnnnnnnnnnnnnnnnnnnnnnnnnnnnnnnnnnnnnnnnnnnnnnnnnnnnnnnnnnnnnnnnnnnnnnnnnnnnnnnnnnnnnnnnnnnnnnnnnnnnnnnnnnnnnnnnnnnnnnnnnnnnnnnnnnnnnnnnnnnnnnnnnnnnnnnnnnnnnnnnnnnnnnnnnnnnnnnnnnnnnnnnnnnnnnnnnnnnnnnnnnnnnnnnnnnnnnnnnnnnnnnnnnnnnnnnnnnnnnnnnnnnnnnnnnnnnnnnnnnnnnnnnnnnnnnnnnnnnnnnnnnnnnnnnnnnnnnnnnnnnnnnnnnnnnnnnnnnnnnnnnnnnnnnnnnnnnnnnnnnnnnnnnnnnnnnnnnnnnnnnnnnnnnnnnnnnnnnnnnnnnnnnnnnnnnnnnnnnnnnnnnnnnnnnnnnnnnnnnnnnnnnnnnnnnnnnnnnnnnnnnnnnnnnnnnnnnnnnnnnnnnnnnnnnnnnnnnnnnnnnnnnnnnnnnnnnnnnnnnnnnnnnnnnnnnnnnnnnnnnnnnnnnnnnnnnnnnnnnnnnnnnnnnnnnnnnnnnnnnnnnnnnnnnnnnnnnnnnnnnnnnnnnnnnnnnnnnnnnnnnnnnnnnnnnnnnnnnnnnnnnnnnnnnnnnnnnnnnnnnnnnnnnnnnnnnnnnnnnnnnnnnnnnnnnnnnnnnnnnnnnnnnnnnnnnnnnnnnnnnnnnnnnnnnnnnnnnnnnnnnnnnnnnnnnnnnnnnnnnnnnnnnnnnnnnnnnnnnnnnnnnnnnnnnnnnnnnnnnnnnnnnnnnnnnnnnnnnnnnnnnnnnnnnnnnnnnnnnnnnnnnnnnnnnnnnnnnnnnnnnnnnnnnnnnnnnnnnnnnnnnnnnnnnnnnnnnnnnnnnnnnnnnnnnnnnnnnnnnnnnnnnnnnnnnnnnnnnnnnnnnnnnnnnnnnnnnnnnnnnnnnnnnnnnnnnnnnnnnnnnnnnnnnnnnnnnnnnnnnnnnnnnnnnnnnnnnnnnnnnnnnnnnnnnnnnnnnnnnnnnnnnnnnnnnnnnnnnnnnnnnnnnnnnnnnnnnnnnnnnnnnnnnnnnnnnnnnnnnnnnnnnnnnnnnnnnnnnnnnnnnnnnnnnnnnnnnnnnnnnnnnnnnnnnnnnnnnnnnnnnnnnnnnnnnnnnnnnnnnnnnnnnnnnnnnnnnnnnnnnnnnnnnnnnnnnnnnnnnnnnnnnnnnnnnnnnnnnnnnnnnnnnnnnnnnnnnnnnnnnnnnnnnnnnnnnnnnnnnnnnnnnnnnnnnnnnnnnnnnnnnnnnnnnnnnnnnnnnnnnnnnnnnnnnnnnnnnnnnnnnnnnnnnnnnnnnnnnnnnnnnnnnnnnnnnnnnnnnnnnnnnnnnnnnnnnnnnnnnnnnnnnnnnnnnnnnnnnnnnnnnnnnnnnnnnnnnnnnnnnnnnnnnnnnnnnnnnnnnnnnnnnnnnnnnnnnnnnnnnnnnnnnnnnnnnnnnnnnnnnnnnnnnnnnnnnnnnnnnnnnnnnnnnnnnnnnnnnnnnnnnnnnnnnnnnnnnnnnnnnnnnnnnnnnnnnnnnnnnnnnnnnnnnnnnnnnnnnnnnnnnnnnnnnnnnnnnnnnnnnnnnnnnnnnnnnnnnnnnnnnnnnnnnnnnnnnnnnnnnnnnnnnnnnnnnnnnnnnnnnnnnnnnnnnnnnnnnnnnnnnnnnnnnnnnnnnnnnnnnnnnnnnnnnnnnnnnnnnnnnnnnnnnnnnnnnnnnnnnnnnnnnnnnnnnnnnnnnnnnnnnnnnnnnnnnnnnnnnnnnnnnnnnnnnnnnnnnnnnnnnnnnnnnnnnnnnnnnnnnnnnnnnnnnnnnnnnnnnnnnnnnnnnnnnnnnnnnnnnnnnnnnnnnnnnnnnnnnnnnnnnnnnnnnnnnnnnnnnnnnnnnnnnnnnnnnnnnnnnnnnnnnnnnnnnnnnnnnnnnnnnnnnnnnnnnnnnnnnnnnnnnnnnnnnnnnnnnnnnnnnnnnnnnnnnnnnnnnnnnnnnnnnnnnnnnnnnnnnnnnnnnnnnnnnnnnnnnnnnnnnnnnnnnnnnnnnnnnnnnnnnnnnnnnnnnnnnnnnnnnnnnnnnnnnnnnnnnnnnnnnnnnnnnnnnnnnnnnnnnnnnnnnnnnnnnnnnnnnnnnnnnnnnnnnnnnnnnnnnnnnnnnnnnnnnnnnnnnnnnnnnnnnnnnnnnnnnnnnnnnnnnnnnnnnnnnnnnnnnnnnnnnnnnnnnnnnnnnnnnnnnnnnnnnnnnnnnnnnnnnnnnnnnnnnnnnnnnnnnnnnnnnnnnnnnnnnnnnnnnnnnnnnnnnnnnnnnnnnnnnnnnnnnnnnnnnnnnnnnnnnnnnnnnnnnnnnnnnnnnnnnnnnnnnnnnnnnnnnnnnnnnnnnnnnnnnnnnnnnnnnnnnnnnnnnnnnnnnnnnnnnnnnnnnnnnnnnnnnnnnnnnnnnnnnnnnnnnnnnnnnnnnnnnnnnnnnnnnnnnnnnnnnnnnnnnnnnnnnnnnnnnnnnnnnnnnnnnnnnnnnnnnnnnnnnnnnnnnnnnnnnnnnnnnnnnnnnnnnnnnnnnnnnnnnnnnnnnnnnnnnnnnnnnnnnnnnnnnnnnnnnnnnnnnnnnnnnnnnnnnnnnnnnnnnnnnnnnnnnnnnnnnnnnnnnnnnnnnnnnnnnnnnnnnnnnnnnnnnnnnnnnnnnnnnnnnnnnnnnnnnnnnnnnnnnnnnnnnnnnnnnnnnnnnnnnnnnnnnnnnnnnnnnnnnnnnnnnnnnnnnnnnnnnnnnnnnnnnnnnnnnnnnnnnnnnnnnnnnnnnnnnnnnnnnnnnnnnnnnnnnnnnnnnnnnnnnnnnnnnnnnnnnnnnnnnnnnnnnnnnnnnnnnnnnnnnnnnnnnnnnnnnnnnnnnnnnnnnnnnnnnnnnnnnnnnnnnnnnnnnnnnnnnnnnnnnnnnnnnnnnnnnnnnnnnnnnnnnnnnnnnnnnnnnnnnnnnnnnnnnnnnnnnnnnnnnnnnnnnnnnnnnnnnnnnnnnnnnnnnnnnnnnnnnnnnnnnnnnnnnnnnnnnnnnnnnnnnnnnnnnnnnnnnnnnnnnnnnnnnnnnnnnnnnnnnnnnnnnnnnnnnnnnnnnnnnnnnnnnnnnnnnnnnnnnnnnnnnnnnnnnnnnnnnnnnnnnnnnnnnnnnnnnnnnnnnnnnnnnnnnnnnnnnnnnnnnnnnnnnnnnnnnnnnnnnnnnnnnnnnnnnnnnnnnnnnnnnnnnnnnnnnnnnnnnnnnnnnnnnnnnnnnnnnnnnnnnnnnnnnnnnnnnnnnnnnnnnnnnnnnnnnnnnnnnnnnnnnnnnnnnnnnnnnnnnnnnnnnnnnnnnnnnnnnnnnnnnnnnnnnnnnnnnnnnnnnnnnnnnnnnnnnnnnnnnnnnnnnnnnnnnnnnnnnnnnnnnnnnnnnnnnnnnnnnnnnnnnnnnnnnnnnnnnnnnnnnnnnnnnnnnnnnnnnnnnnnnnnnnnnnnnnnnnnnnnnnnnnnnnnnnnnnnnnnnnnnnnnnnnnnnnnnnnnnnnnnnnnnnnnnnnnnnnnnnnnnnnnnnnnnnnnnnnnnnnnnnnnnnnnnnnnnnnnnnnnnnnnnnnnnnnnnnnnnnnnnnnnnnnnnnnnnnnnnnnnnnnnnnnnnnnnnnnnnnnnnnnnnnnnnnnnnnnnnnnnnnnnnnnnnnnnnnnnnnnnnnnnnnnnnnnnnnnnnnnnnnnnnnnnnnnnnnnnnnnnnnnnnnnnnnnnnnnnnnnnnnnnnnnnnnnnnnnnnnnnnnnnnnnnnnnnnnnnnnnnnnnnnnnnnnnnnnnnnnnnnnnnnnnnnnnnnnnnnnnnnnnnnnnnnnnnnnnnnnnnnnnnnnnnnnnnnnnnnnnnnnnnnnnnnnnnnnnnnnnnnnnnnnnnnnnnnnnnnnnnnnnnnnnnnnnnnnnnnnnnnnnnnnnnnnnnnnnnnnnnnnnnnnnnnnnnnnnnnnnnnnnnnnnnnnnnnnnnnnnnnnnnnnnnnnnnnnnnnnnnnnnnnnnnnnnnnnnnnnnnnnnnnnnnnnnnnnnnnnnnnnnnnnnnnnnnnnnnnnnnnnnnnnnnnnnnnnnnnnnnnnnnnnnnnnnnnnnnnnnnnnnnnnnnnnnnnnnnnnnnnnnnnnnnnnnnnnnnnnnnnnnnnnnnnnnnnnnnnnnnnnnnnnnnnnnnnnnnnnnnnnnnnnnnnnnnnnnnnnnnnnnnnnnnnnnnnnnnnnnnnnnnnnnnnnnnnnnnnnnnnnnnnnnnnnnnnnnnnnnnnnnnnnnnnnnnnnnnnnnnnnnnnnnnnnnnnnnnnnnnnnnnnnnnnnnnnnnnnnnnnnnnnnnnnnnnnnnnnnnnnnnnnnnnnnnnnnnnnnnnnnnnnnnnnnnnnnnnnnnnnnnnnnnnnnnnnnnnnnnnnnnnnnnnnnnnnnnnnnnnnnnnnnnnnnnnnnnnnnnnnnnnnnnnnnnnnnnnnnnnnnnnnnnnnnnnnnnnnnnnnnnnnnnnnnnnnnnnnnnnnnnnnnnnnnnnnnnnnnnnnnnnnnnnnnnnnnnnnnnnnnnnnnnnnnnnnnnnnnnnnnnnnnnnnnnnnnnnnnnnnnnnnnnnnnnnnnnnnnnnnnnnnnnnnnnnnnnnnnnnnnnnnnnnnnnnnnnnnnnnnnnnnnnnnnnnnnnnnnnnnnnnnnnnnnnnnnnnnnnnnnnnnnnnnnnnnnnnnnnnnnnnnnnnnnnnnnnnnnnnnnnnnnnnnnnnnnnnnnnnnnnnnnnnnnnnnnnnnnnnnnnnnnnnnnnnnnnnnnnnnnnnnnnnnnnnnnnnnnnnnnnnnnnnnnnnnnnnnnnnnnnnnnnnnnnnnnnnnnnnnnnnnnnnnnnnnnnnnnnnnnnnnnnnnnnnnnnnnnnnnnnnnnnnnnnnnnnnnnnnnnnnnnnnnnnnnnnnnnnnnnnnnnnnnnnnnnnnnnnnnnnnnnnnnnnnnnnnnnnnnnnnnnnnnnnnnnnnnnnnnnnnnnnnnnnnnnnnnnnnnnnnnnnnnnnnnnnnnnnnnnnnnnnnnnnnnnnnnnnnnnnnnnnnnnnnnnnnnnnnnnnnnnnnnnnnnnnnnnnnnnnnnnnnnnnnnnnnnnnnnnnnnnnnnnnnnnnnnnnnnnnnnnnnnnnnnnnnnnnnnnnnnnnnnnnnnnnnnnnnnnnnnnnnnnnnnnnnnnnnnnnnnnnnnnnnnnnnnnnnnnnnnnnnnnnnnnnnnnnnnnnnnnnnnnnnnnnnnnnnnnnnnnnnnnnnnnnnnnnnnnnnnnnnnnnnnnnnnnnnnnnnnnnnnnnnnnnnnnnnnnnnnnnnnnnnnnnnnnnnnnnnnnnnnnnnnnnnnnnnnnnnnnnnnnnnnnnnnnnnnnnnnnnnnnnnnnnnnnnnnnnnnnnnnnnnnnnnnnnnnnnnnnnnnnnnnnnnnnnnnnnnnnnnnnnnnnnnnnnnnnnnnnnnnnnnnnnnnnnnnnnnnnnnnnnnnnnnnnnnnnnnnnnnnnnnnnnnnnnnnnnnnnnnnnnnnnnnnnnnnnnnnnnnnnnnnnnnnnnnnnnnnnnnnnnnnnnnnnnnnnnnnnnnnnnnnnnnnnnnnnnnnnnnnnnnnnnnnnnnnnnnnnnnnnnnnnnnnnnnnnnnnnnnnnnnnnnnnnnnnnnnnnnnnnnnnnnnnnnnnnnnnnnnnnnnnnnnnnnnnnnnnnnnnnnnnnnnnnnnnnnnnnnnnnnnnnnnnnnnnnnnnnnnnnnnnnnnnnnnnnnnnnnnnnnnnnnnnnnnnnnnnnnnnnnnnnnnnnnnnnnnnnnnnnnnnnnnnnnnnnnnnnnnnnnnnnnnnnnnnnnnnnnnnnnnnnnnnnnnnnnnnnnnnnnnnnnnnnnnnnnnnnnnnnnnnnnnnnnnnnnnnnnnnnnnnnnnnnnnnnnnnnnnnnnnnnnnnnnnnnnnnnnnnnnnnnnnnnnnnnnnnnnnnnnnnnnnnnnnnnnnnnnnnnnnnnnnnnnnnnnnnnnnnnnnnnnnnnnnnnnnnnnnnnnnnnnnnnnnnnnnnnnnnnnnnnnnnnnnnnnnnnnnnnnnnnnnnnnnnnnnnnnnnnnnnnnnnnnnnnnnnnnnnnnnnnnnnnnnnnnnnnnnnnnnnnnnnnnnnnnnnnnnnnnnnnnnnnnnnnnnnnnnnnnnnnnnnnnnnnnnnnnnnnnnnnnnnnnnnnnnnnnnnnnnnnnnnnnnnnnnnnnnnnnnnnnnnnnnnnnnnnnnnnnnnnnnnnnnnnnnnnnnnnnnnnnnnnnnnnnnnnnnnnnnnnnnnnnnnnnnnnnnnnnnnnnnnnnnnnnnnnnnnnnnnnnnnnnnnnnnnnnnnnnnnnnnnnnnnnnnnnnnnnnnnnnnnnnnnnnnnnnnnnnnnnnnnnnnnnnnnnnnnnnnnnnnnnnnnnnnnnnnnnnnnnnnnnnnnnnnnnnnnnnnnnnnnnnnnnnnnnnnnnnnnnnnnnnnnnnnnnnnnnnnnnnnnnnnnnnnnnnnnnnnnnnnnnnnnnnnnnnnnnnnnnnnnnnnnnnnnnnnnnnnnnnnnnnnnnnnnnnnnnnnnnnnnnnnnnnnnnnnnnnnnnnnnnnnnnnnnnnnnnnnnnnnnnnnnnnnnnnnnnnnnnnnnnnnnnnnnnnnnnnnnnnnnnnnnnnnnnnnnnnnnnnnnnnnnnnnnnnnnnnnnnnnnnnnnnnnnnnnnnnnnnnnnnnnnnnnnnnnnnnnnnnnnnnnnnnnnnnnnnnnnnnnnnnnnnnnnnnnnnnnnnnnnnnnnnnnnnnnnnnnnnnnnnnnnnnnnnnnnnnnnnnnnnnnnnnnnnnnnnnnnnnnnnnnnnnnnnnnnnnnnnnnnnnnnnnnnnnnnnnnnnnnnnnnnnnnnnnnnnnnnnnnnnnnnnnnnnnnnnnnnnnnnnnnnnnnnnnnnnnnnnnnnnnnnnnnnnnnnnnnnnnnnnnnnnnnnnnnnnnnnnnnnnnnnnnnnnnnnnnnnnnnnnnnnnnnnnnnnnnnnnnnnnnnnnnnnnnnnnnnnnnnnnnnnnnnnnnnnnnnnnnnnnnnnnnnnnnnnnnnnnnnnnnnnnnnnnnnnnnnnnnnnnnnnnnnnnnnnnnnnnnnnnnnnnnnnnnnnnnnnnnnnnnnnnnnnnnnnnnnnnnnnnnnnnnnnnnnnnnnnnnnnnnnnnnnnnnnnnnnnnnnnnnnnnnnnnnnnnnnnnnnnnnnnnnnnnnnnnnnnnnnnnnnnnnnnnnnnnnnnnnnnnnnnnnnnnnnnnnnnnnnnnnnnnnnnnnnnnnnnnnnnnnnnnnnnnnnnnnnnnnnnnnnnnnnnnnnnnnnnnnnnnnnnnnnnnnnnnnnnnnnnnnnnnnnnnnnnnnnnnnnnnnnnnnnnnnnnnnnnnnnnnnnnnnnnnnnnnnnnnnnnnnnnnnnnnnnnnnnnnnnnnnnnnnnnnnnnnnnnnnnnnnnnnnnnnnnnnnnnnnnnnnnnnnnnnnnnnnnnnnnnnnnnnnnnnnnnnnnnnnnnnnnnnnnnnnnnnnnnnnnnnnnnnnnnnnnnnnnnnnnnnnnnnnnnnnnnnnnnnnnnnnnnnnnnnnnnnnnnnnnnnnnnnnnnnnnnnnnnnnnnnnnnnnnnnnnnnnnnnnnnnnnnnnnnnnnnnnnnnnnnnnnnnnnnnnnnnnnnnnnnnnnnnnnnnnnnnnnnnnnnnnnnnnnnnnnnnnnnnnnnnnnnnnnnnnnnnnnnnnnnnnnnnnnnnnnnnnnnnnnnnnnnnnnnnnnnnnnnnnnnnnnnnnnnnnnnnnnnnnnnnnnnnnnnnnnnnnnnnnnnnnnnnnnnnnnnnnnnnnnnnnnnnnnnnnnnnnnnnnnnnnnnnnnnnnnnnnnnnnnnnnnnnnnnnnnnnnnnnnnnnnnnnnnnnnnnnnnnnnnnnnnnnnnnnnnnnnnnnnnnnnnnnnnnnnnnnnnnnnnnnnnnnnnnnnnnnnnnnnnnnnnnnnnnnnnnnnnnnnnnnnnnnnnnnnnnnnnnnnnnnnnnnnnnnnnnnnnnnnnnnnnnnnnnnnnnnnnnnnnnnnnnnnnnnnnnnnnnnnnnnnnnnnnnnnnnnnnnnnnnnnnnnnnnnnnnnnnnnnnnnnnnnnnnnnnnnnnnnnnnnnnnnnnnnnnnnnnnnnnnnnnnnnnnnnnnnnnnnnnnnnnnnnnnnnnnnnnnnnnnnnnnnnnnnnnnnnnnnnnnnnnnnnnnnnnnnnnnnnnnnnnnnnnnnnnnnnnnnnnnnnnnnnnnnnnnnnnnnnnnnnnnnnnnnnnnnnnnnnnnnnnnnnnnnnnnnnnnnnnnnnnnnnnnnnnnnnnnnnnnnnnnnnnnnnnnnnnnnnnnnnnnnnnnnnnnnnnnnnnnnnnnnnnnnnnnnnnnnnnnnnnnnnnnnnnnnnnnnnnnnnnnnnnnnnnnnnnnnnnnnnnnnnnnnnnnnnnnnnnnnnnnnnnnnnnnnnnnnnnnnnnnnnnnnnnnnnnnnnnnnnnnnnnnnnnnnnnnnnnnnnnnnnnnnnnnnnnnnnnnnnnnnnnnnnnnnnnnnnnnnnnnnnnnnnnnnnnnnnnnnnnnnnnnnnnnnnnnnnnnnnnnnnnnnnnnnnnnnnnnnnnnnnnnnnnnnnnnnnnnnnnnnnnnnnnnnnnnnnnnnnnnnnnnnnnnnnnnnnnnnnnnnnnnnnnnnnnnnnnnnnnnnnnnnnnnnnnnnnnnnnnnnnnnnnnnnnnnnnnnnnnnnnnnnnnnnnnnnnnnnnnnnnnnnnnnnnnnnnnnnnnnnnnnnnnnnnnnnnnnnnnnnnnnnnnnnnnnnnnnnnnnnnnnnnnnnnnnnnnnnnnnnnnnnnnnnnnnnnnnnnnnnnnnnnnnnnnnnnnnnnnnnnnnnnnnnnnnnnnnnnnnnnnnnnnnnnnnnnnnnnnnnnnnnnnnnnnnnnnnnnnnnnnnnnnnnnnnnnnnnnnnnnnnnnnnnnnnnnnnnnnnnnnnnnnnnnnnnnnnnnnnnnnnnnnnnnnnnnnnnnnnnnnnnnnnnnnnnnnnnnnnnnnnnnnnnnnnnnnnnnnnnnnnnnnnnnnnnnnnnnnnnnnnnnnnnnnnnnnnnnnnnnnnnnnnnnnnnnnnnnnnnnnnnnnnnnnnnnnnnnnnnnnnnnnnnnnnnnnnnnnnnnnnnnnnnnnnnnnnnnnnnnnnnnnnnnnnnnnnnnnnnnnnnnnnnnnnnnnnnnnnnnnnnnnnnnnnnnnnnnnnnnnnnnnnnnnnnnnnnnnnnnnnnnnnnnnnnnnnnnnnnnnnnnnnnnnnnnnnnnnnnnnnnnnnnnnnnnnnnnnnnnnnnnnnnnnnnnnnnnnnnnnnnnnnnnnnnnnnnnnnnnnnnnnnnnnnnnnnnnnnnnnnnnnnnnnnnnnnnnnnnnnnnnnnnnnnnnnnnnnnnnnnnnnnnnnnnnnnnnnnnnnnnnnnnnnnnnnnnnnnnnnnnnnnnnnnnnnnnnnnnnnnnnnnnnnnnnnnnnnnnnnnnnnnnnnnnnnnnnnnnnnnnnnnnnnnnnnnnnnnnnnnnnnnnnnnnnnnnnnnnnnnnnnnnnnnnnnnnnnnnnnnnnnnnnnnnnnnnnnnnnnnnnnnnnnnnnnnnnnnnnnnnnnnnnnnnnnnnnnnnnnnnnnnnnnnnnnnnnnnnnnnnnnnnnnnnnnnnnnnnnnnnnnnnnnnnnnnnnnnnnnnnnnnnnnnnnnnnnnnnnnnnnnnnnnnnnnnnnnnnnnnnnnnnnnnnnnnnnnnnnnnnnnnnnnnnnnnnnnnnnnnnnnnnnnnnnnnnnnnnnnnnnnnnnnnnnnnnnnnnnnnnnnnnnnnnnnnnnnnnnnnnnnnnnnnnnnnnnnnnnnnnnnnnnnnnnnnnnnnnnnnnnnnnnnnnnnnnnnnnnnnnnnnnnnnnnnnnnnnnnnnnnnnnnnnnnnnnnnnnnnnnnnnnnnnnnnnnnnnnnnnnnnnnnnnnnnnnnnnnnnnnnnnnnnnnnnnnnnnnnnnnnnnnnnnnnnnnnnnnnnnnnnnnnnnnnnnnnnnnnnnnnnnnnnnnnnnnnnnnnnnnnnnnnnnnnnnnnnnnnnnnnnnnnnnnnnnnnnnnnnnnnnnnnnnnnnnnnnnnnnnnnnnnnnnnnnnnnnnnnnnnnnnnnnnnnnnnnnnnnnnnnnnnnnnnnnnnnnnnnnnnnnnnnnnnnnnnnnnnnnnnnnnnnnnnnnnnnnnnnnnnnnnnnnnnnnnnnnnnnnnnnnnnnnnnnnnnnnnnnnnnnnnnnnnnnnnnnnnnnnnnnnnnnnnnnnnnnnnnnnnnnnnnnnnnnnnnnnnnnnnnnnnnnnnnnnnnnnnnnnnnnnnnnnnnnnnnnnnnnnnnnnnnnnnnnnnnnnnnnnnnnnnnnnnnnnnnnnnnnnnnnnnnnnnnnnnnnnnnnnnnnnnnnnnnnnnnnnnnnnnnnnnnnnnnnnnnnnnnnnnnnnnnnnnnnnnnnnnnnnnnnnnnnnnnnnnnnnnnnnnnnnnnnnnnnnnnnnnnnnnnnnnnnnnnnnnnnnnnnnnnnnnnnnnnnnnnnnnnnnnnnnnnnnnnnnnnnnnnnnnnnnnnnnnnnnnnnnnnnnnnnnnnnnnnnnnnnnnnnnnnnnnnnnnnnnnnnnnnnnnnnnnnnnnnnnnnnnnnnnnnnnnnnnnnnnnnnnnnnnnnnnnnnnnnnnnnnnnnnnnnnnnnnnnnnnnnnnnnnnnnnnnnnnnnnnnnnnnnnnnnnnnnnnnnnnnnnnnnnnnnnnnnnnnnnnnnnnnnnnnnnnnnnnnnnnnnnnnnnnnnnnnnnnnnnnnnnnnnnnnnnnnnnnnnnnnnnnnnnnnnnnnnnnnnnnnnnnnnnnnnnnnnnnnnnnnnnnnnnnnnnnnnnnnnnnnnnnnnnnnnnnnnnnnnnnnnnnnnnnnnnnnnnnnnnnnnnnnnnnnnnnnnnnnnnnnnnnnnnnnnnnnnnnnnnnnnnnnnnnnnnnnnnnnnnnnnnnnnnnnnnnnnnnnnnnnnnnnnnnnnnnnnnnnnnnnnnnnnnnnnnnnnnnnnnnnnnnnnnnnnnnnnnnnnnnnnnnnnnnnnnnnnnnnnnnnnnnnnnnnnnnnnnnnnnnnnnnnnnnnnnnnnnnnnnnnnnnnnnnnnnnnnnnnnnnnnnnnnnnnnnnnnnnnnnnnnnnnnnnnnnnnnnnnnnnnnnnnnnnnnnnnnnnnnnnnnnnnnnnnnnnnnnnnnnnnnnnnnnnnnnnnnnnnnnnnnnnnnnnnnnnnnnnnnnnnnnnnnnnnnnnnnnnnnnnnnnnnnnnnnnnnnnnnnnnnnnnnnnnnnnnnnnnnnnnnnnnnnnnnnnnnnnnnnnnnnnnnnnnnnnnnnnnnnnnnnnnnnnnnnnnnnnnnnnnnnnnnnnnnnnnnnnnnnnnnnnnnnnnnnnnnnnnnnnnnnnnnnnnnnnnnnnnnnnnnnnnnnnnnnnnnnnnnnnnnnnnnnnnnnnnnnnnnnnnnnnnnnnnnnnnnnnnnnnnnnnnnnnnnnnnnnnnnnnnnnnnnnnnnnnnnnnnnnnnnnnnnnnnnnnnnnnnnnnnnnnnnnnnnnnnnnnnnnnnnnnnnnnnnnnnnnnnnnnnnnnnnnnnnnnnnnnnnnnnnnnnnnnnnnnnnnnnnnnnnnnnnnnnnnnnnnnnnnnnnnnnnnnnnnnnnnnnnnnnnnnnnnnnnnnnnnnnnnnnnnnnnnnnnnnnnnnnnnnnnnnnnnnnnnnnnnnnnnnnnnnnnnnnnnnnnnnnnnnnnnnnnnnnnnnnnnnnnnnnnnnnnnnnnnnnnnnnnnnnnnnnnnnnnnnnnnnnnnnnnnnnnnnnnnnnnnnnnnnnnnnnnnnnnnnnnnnnnnnnnnnnnnnnnnnnnnnnnnnnnnnnnnnnnnnnnnnnnnnnnnnnnnnnnnnnnnnnnnnnnnnnnnnnnnnnnnnnnnnnnnnnnnnnnnnnnnnnnnnnnnnnnnnnnnnnnnnnnnnnnnnnnnnnnnnnnnnnnnnnnnnnnnnnnnnnnnnnnnnnnnnnnnnnnnnnnnnnnnnnnnnnnnnnnnnnnnnnnnnnnnnnnnnnnnnnnnnnnnnnnnnnnnnnnnnnnnnnnnnnnnnnnnnnnnnnnnnnnnnnnnnnnnnnnnnnnnnnnnnnnnnnnnnnnnnnnnnnnnnnnnnnnnnnnnnnnnnnnnnnnnnnnnnnnnnnnnnnnnnnnnnnnnnnnnnnnnnnnnnnnnnnnnnnnnnnnnnnnnnnnnnnnnnnnnnnnnnnnnnnnnnnnnnnnnnnnnnnnnnnnnnnnnnnnnnnnnnnnnnnnnnnnnnnnnnnnnnnnnnnnnnnnnnnnnnnnnnnnnnnnnnnnnnnnnnnnnnnnnnnnnnnnnnnnnnnnnnnnnnnnnnnnnnnnnnnnnnnnnnnnnnnnnnnnnnnnnnnnnnnnnnnnnnnnnnnnnnnnnnnnnnnnnnnnnnnnnnnnnnnnnnnnnnnnnnnnnnnnnnnnnnnnnnnnnnnnnnnnnnnnnnnnnnnnnnnnnnnnnnnnnnnnnnnnnnnnnnnnnnnnnnnnnnnnnnnnnnnnnnnnnnnnnnnnnnnnnnnnnnnnnnnnnnnnnnnnnnnnnnnnnnnnnnnnnnnnnnnnnnnnnnnnnnnnnnnnnnnnnnnnnnnnnnnnnnnnnnnnnnnnnnnnnnnnnnnnnnnnnnnnnnnnnnnnnnnnnnnnnnnnnnnnnnnnnnnnnnnnnnnnnnnnnnnnnnnnnnnnnnnnnnnnnnnnnnnnnnnnnnnnnnnnnnnnnnnnnnnnnnnnnnnnnnnnnnnnnnnnnnnnnnnnnnnnnnnnnnnnnnnnnnnnnnnnnnnnnnnnnnnnnnnnnnnnnnnnnnnnnnnnnnnnnnnnnnnnnnnnnnnnnnnnnnnnnnnnnnnnnnnnnnnnnnnnnnnnnnnnnnnnnnnnnnnnnnnnnnnnnnnnnnnnnnnnnnnnnnnnnnnnnnnnnnnnnnnnnnnnnnnnnnnnnnnnnnnnnnnnnnnnnnnnnnnnnnnnnnnnnnnnnnnnnnnnnnnnnnnnnnnnnnnnnnnnnnnnnnnnnnnnnnnnnnnnnnnnnnnnnnnnnnnnnnnnnnnnnnnnnnnnnnnnnnnnnnnnnnnnnnnnnnnnnnnnnnnnnnnnnnnnnnnnnnnnnnnnnnnnnnnnnnnnnnnnnnnnnnnnnnnnnnnnnnnnnnnnnnnnnnnnnnnnnnnnnnnnnnnnnnnnnnnnnnnnnnnnnnnnnnnnnnnnnnnnnnnnnnnnnnnnnnnnnnnnnnnnnnnnnnnnnnnnnnnnnnnnnnnnnnnnnnnnnnnnnnnnnnnnnnnnnnnnnnnnnnnnnnnnnnnnnnnnnnnnnnnnnnnnnnnnnnnnnnnnnnnnnnnnnnnnnnnnnnnnnnnnnnnnnnnnnnnnnnnnnnnnnnnnnnnnnnnnnnnnnnnnnnnnnnnnnnnnnnnnnnnnnnnnnnnnnnnnnnnnnnnnnnnnnnnnnnnnnnnnnnnnnnnnnnnnnnnnnnnnnnnnnnnnnnnnnnnnnnnnnnnnnnnnnnnnnnnnnnnnnnnnnnnnnnnnnnnnnnnnnnnnnnnnnnnnnnnnnnnnnnnnnnnnnnnnnnnnnnnnnnnnnnnnnnnnnnnnnnnnnnnnnnnnnnnnnnnnnnnnnnnnnnnnnnnnnnnnnnnnnnnnnnnnnnnnnnnnnnnnnnnnnnnnnnnnnnnnnnnnnnnnnnnnnnnnnnnnnnnnnnnnnnnnnnnnnnnnnnnnnnnnnnnnnnnnnnnnnnnnnnnnnnnnnnnnnnnnnnnnnnnnnnnnnnnnnnnnnnnnnnnnnnnnnnnnnnnnnnnnnnnnnnnnnnnnnnnnnnnnnnnnnnnnnnnnnnnnnnnnnnnnnnnnnnnnnnnnnnnnnnnnnnnnnnnnnnnnnnnnnnnnnnnnnnnnnnnnnnnnnnnnnnnnnnnnnnnnnnnnnnnnnnnnnnnnnnnnnnnnnnnnnnnnnnnnnnnnnnnnnnnnnnnnnnnnnnnnnnnnnnnnnnnnnnnnnnnnnnnnnnnnnnnnnnnnnnnnnnnnnnnnnnnnnnnnnnnnnnnnnnnnnnnnnnnnnnnnnnnnnnnnnnnnnnnnnnnnnnnnnnnnnnnnnnnnnnnnnnnnnnnnnnnnnnnnnnnnnnnnnnnnnnnnnnnnnnnnnnnnnnnnnnnnnnnnnnnnnnnnnnnnnnnnnnnnnnnnnnnnnnnnnnnnnnnnnnnnnnnnnnnnnnnnnnnnnnnnnnnnnnnnnnnnnnnnnnnnnnnnnnnnnnnnnnnnnnnnnnnnnnnnnnnnnnnnnnnnnnnnnnnnnnnnnnnnnnnnnnnnnnnnnnnnnnnnnnnnnnnnnnnnnnnnnnnnnnnnnnnnnnnnnnnnnnnnnnnnnnnnnnnnnnnnnnnnnnnnnnnnnnnnnnnnnnnnnnnnnnnnnnnnnnnnnnnnnnnnnnnnnnnnnnnnnnnnnnnnnnnnnnnnnnnnnnnnnnnnnnnnnnnnnnnnnnnnnnnnnnnnnnnnnnnnnnnnnnnnnnnnnnnnnnnnnnnnnnnnnnnnnnnnnnnnnnnnnnnnnnnnnnnnnnnnnnnnnnnnnnnnnnnnnnnnnnnnnnnnnnnnnnnnnnnnnnnnnnnnnnnnnnnnnnnnnnnnnnnnnnnnnnnnnnnnnnnnnnnnnnnnnnnnnnnnnnnnnnnnnnnnnnnnnnnnnnnnnnnnnnnnnnnnnnnnnnnnnnnnnnnnnnnnnnnnnnnnnnnnnnnnnnnnnnnnnnnnnnnnnnnnnnnnnnnnnnnnnnnnnnnnnnnnnnnnnnnnnnnnnnnnnnnnnnnnnnnnnnnnnnnnnnnnnnnnnnnnnnnnnnnnnnnnnnnnnnnnnnnnnnnnnnnnnnnnnnnnnnnnnnnnnnnnnnnnnnnnnnnnnnnnnnnnnnnnnnnnnnnnnnnnnnnnnnnnnnnnnnnnnnnnnnnnnnnnnnnnnnnnnnnnnnnnnnnnnnnnnnnnnnnnnnnnnnnnnnnnnnnnnnnnnnnnnnnnnnnnnnnnnnnnnnnnnnnnnnnnnnnnnnnnnnnnnnnnnnnnnnnnnnnnnnnnnnnnnnnnnnnnnnnnnnnnnnnnnnnnnnnnnnnnnnnnnnnnnnnnnnnnnnnnnnnnnnnnnnnnnnnnnnnnnnnnnnnnnnnnnnnnnnnnnnnnnnnnnnnnnnnnnnnnnnnnnnnnnnnnnnnnnnnnnnnnnnnnnnnnnnnnnnnnnnnnnnnnnnnnnnnnnnnnnnnnnnnnnnnnnnnnnnnnnnnnnnnnnnnnnnnnnnnnnnnnnnnnnnnnnnnnnnnnnnnnnnnnnnnnnnnnnnnnnnnnnnnnnnnnnnnnnnnnnnnnnnnnnnnnnnnnnnnnnnnnnnnnnnnnnnnnnnnnnnnnnnnnnnnnnnnnnnnnnnnnnnnnnnnnnnnnnnnnnnnnnnnnnnnnnnnnnnnnnnnnnnnnnnnnnnnnnnnnnnnnnnnnnnnnnnnnnnnnnnnnnnnnnnnnnnnnnnnnnnnnnnnnnnnnnnnnnnnnnnnnnnnnnnnnnnnnnnnnnnnnnnnnnnnnnnnnnnnnnnnnnnnnnnnnnnnnnnnnnnnnnnnnnnnnnnnnnnnnnnnnnnnnnnnnnnnnnnnnnnnnnnnnnnnnnnnnnnnnnnnnnnnnnnnnnnnnnnnnnnnnnnnnnnnnnnnnnnnnnnnnnnnnnnnnnnnnnnnnnnnnnnnnnnnnnnnnnnnnnnnnnnnnnnnnnnnnnnnnnnnnnnnnnnnnnnnnnnnnnnnnnnnnnnnnnnnnnnnnnnnnnnnnnnnnnnnnnnnnnnnnnnnnnnnnnnnnnnnnnnnnnnnnnnnnnnnnnnnnnnnnnnnnnnnnnnnnnnnnnnnnnnnnnnnnnnnnnnnnnnnnnnnnnnnnnnnnnnnnnnnnnnnnnnnnnnnnnnnnnnnnnnnnnnnnnnnnnnnnnnnnnnnnnnnnnnnnnnnnnnnnnnnnnnnnnnnnnnnnnnnnnnnnnnnnnnnnnnnnnnnnnnnnnnnnnnnnnnnnnnnnnnnnnnnnnnnnnnnnnnnnnnnnnnnnnnnnnnnnnnnnnnnnnnnnnnnnnnnnnnnnnnnnnnnnnnnnnnnnnnnnnnnnnnnnnnnnnnnnnnnnnnnnnnnnnnnnnnnnnnnnnnnnnnnnnnnnnnnnnnnnnnnnnnnnnnnnnnnnnnnnnnnnnnnnnnnnnnnnnnnnnnnnnnnnnnnnnnnnnnnnnnnnnnnnnnnnnnnnnnnnnnnnnnnnnnnnnnnnnnnnnnnnnnnnnnnnnnnnnnnnnnnnnnnnnnnnnnnnnnnnnnnnnnnnnnnnnnnnnnnnnnnnnnnnnnnnnnnnnnnnnnnnnnnnnnnnnnnnnnnnnnnnnnnnnnnnnnnnnnnnnnnnnnnnnnnnnnnnnnnnnnnnnnnnnnnnnnnnnnnnnnnnnnnnnnnnnnnnnnnnnnnnnnnnnnnnnnnnnnnnnnnnnnnnnnnnnnnnnnnnnnnnnnnnnnnnnnnnnnnnnnnnnnnnnnnnnnnnnnnnnnnnnnnnnnnnnnnnnnnnnnnnnnnnnnnnnnnnnnnnnnnnnnnnnnnnnnnnnnnnnnnnnnnnnnnnnnnnnnnnnnnnnnnnnnnnnnnnnnnnnnnnnnnnnnnnnnnnnnnnnnnnnnnnnnnnnnnnnnnnnnnnnnnnnnnnnnnnnnnnnnnnnnnnnnnnnnnnnnnnnnnnnnnnnnnnnnnnnnnnnnnnnnnnnnnnnnnnnnnnnnnnnnnnnnnnnnnnnnnnnnnnnnnnnnnnnnnnnnnnnnnnnnnnnnnnnnnnnnnnnnnnnnnnnnnnnnnnnnnnnnnnnnnnnnnnnnnnnnnnnnnnnnnnnnnnnnnnnnnnnnnnnnnnnnnnnnnnnnnnnnnnnnnnnnnnnnnnnnnnnnnnnnnnnnnnnnnnnnnnnnnnnnnnnnnnnnnnnnnnnnnnnnnnnnnnnnnnnnnnnnnnnnnnnnnnnnnnnnnnnnnnnnnnnnnnnnnnnnnnnnnnnnnnnnnnnnnnnnnnnnnnnnnnnnnnnnnnnnnnnnnnnnnnnnnnnnnnnnnnnnnnnnnnnnnnnnnnnnnnnnnnnnnnnnnnnnnnnnnnnnnnnnnnnnnnnnnnnnnnnnnnnnnnnnnnnnnnnnnnnnnnnnnnnnnnnnnnnnnnnnnnnnnnnnnnnnnnnnnnnnnnnnnnnnnnnnnnnnnnnnnnnnnnnnnnnnnnnnnnnnnnnnnnnnnnnnnnnnnnnnnnnnnnnnnnnnnnnnnnnnnnnnnnnnnnnnnnnnnnnnnnnnnnnnnnnnnnnnnnnnnnnnnnnnnnnnnnnnnnnnnnnnnnnnnnnnnnnnnnnnnnnnnnnnnnnnnnnnnnnnnnnnnnnnnnnnnnnnnnnnnnnnnnnnnnnnnnnnnnnnnnnnnnnnnnnnnnnnnnnnnnnnnnnnnnnnnnnnnnnnnnnnnnnnnnnnnnnnnnnnnnnnnnnnnnnnnnnnnnnnnnnnnnnnnnnnnnnnnnnnnnnnnnnnnnnnnnnnnnnnnnnnnnnnnnnnnnnnnnnnnnnnnnnnnnnnnnnnnnnnnnnnnnnnnnnnnnnnnnnnnnnnnnnnnnnnnnnnnnnnnnnnnnnnnnnnnnnnnnnnnnnnnnnnnnnnnnnnnnnnnnnnnnnnnnnnnnnnnnnnnnnnnnnnnnnnnnnnnnnnnnnnnnnnnnnnnnnnnnnnnnnnnnnnnnnnnnnnnnnnnnnnnnnnnnnnnnnnnnnnnnnnnnnnnnnnnnnnnnnnnnnnnnnnnnnnnnnnnnnnnnnnnnnnnnnnnnnnnnnnnnnnnnnnnnnnnnnnnnnnnnnnnnnnnnnnnnnnnnnnnnnnnnnnnnnnnnnnnnnnnnnnnnnnnnnnnnnnnnnnnnnnnnnnnnnnnnnnnnnnnnnnnnnnnnnnnnnnnnnnnnnnnnnnnnnnnnnnnnnnnnnnnnnnnnnnnnnnnnnnnnnnnnnnnnnnnnnnnnnnnnnnnnnnnnnnnnnnnnnnnnnnnnnnnnnnnnnnnnnnnnnnnnnnnnnnnnnnnnnnnnnnnnnnnnnnnnnnnnnnnnnnnnnnnnnnnnnnnnnnnnnnnnnnnnnnnnnnnnnnnnnnnnnnnnnnnnnnnnnnnnnnnnnnnnnnnnnnnnnnnnnnnnnnnnnnnnnnnnnnnnnnnnnnnnnnnnnnnnnnnnnnnnnnnnnnnnnnnnnnnnnnnnnnnnnnnnnnnnnnnnnnnnnnnnnnnnnnnnnnnnnnnnnnnnnnnnnnnnnnnnnnnnnnnnnnnnnnnnnnnnnnnnnnnnnnnnnnnnnnnnnnnnnnnnnnnnnnnnnnnnnnnnnnnnnnnnnnnnnnnnnnnnnnnnnnnnnnnnnnnnnnnnnnnnnnnnnnnnnnnnnnnnnnnnnnnnnnnnnnnnnnnnnnnnnnnnnnnnnnnnnnnnnnnnnnnnnnnnnnnnnnnnnnnnnnnnnnnnnnnnnnnnnnnnnnnnnnnnnnnnnnnnnnnnnnnnnnnnnnnnnnnnnnnnnnnnnnnnnnnnnnnnnnnnnnnnnnnnnnnnnnnnnnnnnnnnnnnnnnnnnnnnnnnnnnnnnnnnnnnnnnnnnnnnnnnnnnnnnnnnnnnnnnnnnnnnnnnnnnnnnnnnnnnnnnnnnnnnnnnnnnnnnnnnnnnnnnnnnnnnnnnnnnnnnnnnnnnnnnnnnnnnnnnnnnnnnnnnnnnnnnnnnnnnnnnnnnnnnnnnnnnnnnnnnnnnnnnnnnnnnnnnnnnnnnnnnnnnnnnnnnnnnnnnnnnnnnnnnnnnnnnnnnnnnnnnnnnnnnnnnnnnnnnnnnnnnnnnnnnnnnnnnnnnnnnnnnnnnnnnnnnnnnnnnnnnnnnnnnnnnnnnnnnnnnnnnnnnnnnnnnnnnnnnnnnnnnnnnnnnnnnnnnnnnnnnnnnnnnnnnnnnnnnnnnnnnnnnnnnnnnnnnnnnnnnnnnnnnnnnnnnnnnnnnnnnnnnnnnnnnnnnnnnnnnnnnnnnnnnnnnnnnnnnnnnnnnnnnnnnnnnnnnnnnnnnnnnnnnnnnnnnnnnnnnnnnnnnnnnnnnnnnnnnnnnnnnnnnnnnnnnnnnnnnnnnnnnnnnnnnnnnnnnnnnnnnnnnnnnnnnnnnnnnnnnnnnnnnnnnnnnnnnnnnnnnnnnnnnnnnnnnnnnnnnnnnnnnnnnnnnnnnnnnnnnnnnnnnnnnnnnnnnnnnnnnnnnnnnnnnnnnnnnnnnnnnnnnnnnnnnnnnnnnnnnnnnnnnnnnnnnnnnnnnnnnnnnnnnnnnnnnnnnnnnnnnnnnnnnnnnnnnnnnnnnnnnnnnnnnnnnnnnnnnnnnnnnnnnnnnnnnnnnnnnnnnnnnnnnnnnnnnnnnnnnnnnnnnnnnnnnnnnnnnnnnnnnnnnnnnnnnnnnnnnnnnnnnnnnnnnnnnnnnnnnnnnnnnnnnnnnnnnnnnnnnnnnnnnnnnnnnnnnnnnnnnnnnnnnnnnnnnnnnnnnnnnnnnnnnnnnnnnnnnnnnnnnnnnnnnnnnnnnnnnnnnnnnnnnnnnnnnnnnnnnnnnnnnnnnnnnnnnnnnnnnnnnnnnnnnnnnnnnnnnnnnnnnnnnnnnnnnnnnnnnnnnnnnnnnnnnnnnnnnnnnnnnnnnnnnnnnnnnnnnnnnnnnnnnnnnnnnnnnnnnnnnnnnnnnnnnnnnnnnnnnnnnnnnnnnnnnnnnnnnnnnnnnnnnnnnnnnnnnnnnnnnnnnnnnnnnnnnnnnnnnnnnnnnnnnnnnnnnnnnnnnnnnnnnnnnnnnnnnnnnnnnnnnnnnnnnnnnnnnnnnnnnnnnnnnnnnnnnnnnnnnnnnnnnnnnnnnnnnnnnnnnnnnnnnnnnnnnnnnnnnnnnnnnnnnnnnnnnnnnnnnnnnnnnnnnnnnnnnnnnnnnnnnnnnnnnnnnnnnnnnnnnnnnnnnnnnnnnnnnnnnnnnnnnnnnnnnnnnnnnnnnnnnnnnnnnnnnnnnnnnnnnnnnnnnnnnnnnnnnnnnnnnnnnnnnnnnnnnnnnnnnnnnnnnnnnnnnnnnnnnnnnnnnnnnnnnnnnnnnnnnnnnnnnnnnnnnnnnnnnnnnnnnnnnnnnnnnnnnnnnnnnnnnnnnnnnnnnnnnnnnnnnnnnnnnnnnnnnnnnnnnnnnnnnnnnnnnnnnnnnnnnnnnnnnnnnnnnnnnnnnnnnnnnnnnnnnnnnnnnnnnnnnnnnnnnnnnnnnnnnnnnnnnnnnnnnnnnnnnnnnnnnnnnnnnnnnnnnnnnnnnnnnnnnnnnnnnnnnnnnnnnnnnnnnnnnnnnnnnnnnnnnnnnnnnnnnnnnnnnnnnnnnnnnnnnnnnnnnnnnnnnnnnnnnnnnnnnnnnnnnnnnnnnnnnnnnnnnnnnnnnnnnnnnnnnnnnnnnnnnnnnnnnnnnnnnnnnnnnnnnnnnnnnnnnnnnnnnnnnnnnnnnnnnnnnnnnnnnnnnnnnnnnnnnnnnnnnnnnnnnnnnnnnnnnnnnnnnnnnnnnnnnnnnnnnnnnnnnnnnnnnnnnnnnnnnnnnnnnnnnnnnnnnnnnnnnnnnnnnnnnnnnnnnnnnnnnnnnnnnnnnnnnnnnnnnnnnnnnnnnnnnnnnnnnnnnnnnnnnnnnnnnnnnnnnnnnnnnnnnnnnnnnnnnnnnnnnnnnnnnnnnnnnnnnnnnnnnnnnnnnnnnnnnnnnnnnnnnnnnnnnnnnnnnnnnnnnnnnnnnnnnnnnnnnnnnnnnnnnnnnnnnnnnnnnnnnnnnnnnnnnnnnnnnnnnnnnnnnnnnnnnnnnnnnnnnnnnnnnnnnnnnnnnnnnnnnnnnnnnnnnnnnnnnnnnnnnnnnnnnnnnnnnnnnnnnnnnnnnnnnnnnnnnnnnnnnnnnnnnnnnnnnnnnnnnnnnnnnnnnnnnnnnnnnnnnnnnnnnnnnnnnnnnnnnnnnnnnnnnnnnnnnnnnnnnnnnnnnnnnnnnnnnnnnnnnnnnnnnnnnnnnnnnnnnnnnnnnnnnnnnnnnnnnnnnnnnnnnnnnnnnnnnnnnnnnnnnnnnnnnnnnnnnnnnnnnnnnnnnnnnnnnnnnnnnnnnnnnnnnnnnnnnnnnnnnnnnnnnnnnnnnnnnnnnnnnnnnnnnnnnnnnnnnnnnnnnnnnnnnnnnnnnnnnnnnnnnnnnnnnnnnnnnnnnnnnnnnnnnnnnnnnnnnnnnnnnnnnnnnnnnnnnnnnnnnnnnnnnnnnnnnnnnnnnnnnnnnnnnnnnnnnnnnnnnnnnnnnnnnnnnnnnnnnnnnnnnnnnnnnnnnnnnnnnnnnnnnnnnnnnnnnnnnnnnnnnnnnnnnnnnnnnnnnnnnnnnnnnnnnnnnnnnnnnnnnnnnnnnnnnnnnnnnnnnnnnnnnnnnnnnnnnnnnnnnnnnnnnnnnnnnnnnnnnnnnnnnnnnnnnnnnnnnnnnnnnnnnnnnnnnnnnnnnnnnnnnnnnnnnnnnnnnnnnnnnnnnnnnnnnnnnnnnnnnnnnnnnnnnnnnnnnnnnnnnnnnnnnnnnnnnnnnnnnnnnnnnnnnnnnnnnnnnnnnnnnnnnnnnnnnnnnnnnnnnnnnnnnnnnnnnnnnnnnnnnnnnnnnnnnnnnnnnnnnnnnnnnnnnnnnnnnnnnnnnnnnnnnnnnnnnnnnnnnnnnnnnnnnnnnnnnnnnnnnnnnnnnnnnnnnnnnnnnnnnnnnnnnnnnnnnnnnnnnnnnnnnnnnnnnnnnnnnnnnnnnnnnnnnnnnnnnnnnnnnnnnnnnnnnnnnnnnnnnnnnnnnnnnnnnnnnnnnnnnnnnnnnnnnnnnnnnnnnnnnnnnnnnnnnnnnnnnnnnnnnnnnnnnnnnnnnnnnnnnnnnnnnnnnnnnnnnnnnnnnnnnnnnnnnnnnnnnnnnnnnnnnnnnnnnnnnnnnnnnnnnnnnnnnnnnnnnnnnnnnnnnnnnnnnnnnnnnnnnnnnnnnnnnnnnnnnnnnnnnnnnnnnnnnnnnnnnnnnnnnnnnnnnnnnnnnnnnnnnnnnnnnnnnnnnnnnnnnnnnnnnnnnnnnnnnnnnnnnnnnnnnnnnnnnnnnnnnnnnnnnnnnnnnnnnnnnnnnnnnnnnnnnnnnnnnnnnnnnnnnnnnnnnnnnnnnnnnnnnnnnnnnnnnnnnnnnnnnnnnnnnnnnnnnnnnnnnnnnnnnnnnnnnnnnnnnnnnnnnnnnnnnnnnnnnnnnnnnnnnnnnnnnnnnnnnnnnnnnnnnnnnnnnnnnnnnnnnnnnnnnnnnnnnnnnnnnnnnnnnnnnnnnnnnnnnnnnnnnnnnnnnnnnnnnnnnnnnnnnnnnnnnnnnnnnnnnnnnnnnnnnnnnnnnnnnnnnnnnnnnnnnnnnnnnnnnnnnnnnnnnnnnnnnnnnnnnnnnnnnnnnnnnnnnnnnnnnnnnnnnnnnnnnnnnnnnnnnnnnnnnnnnnnnnnnnnnnnnnnnnnnnnnnnnnnnnnnnnnnnnnnnnnnnnnnnnnnnnnnnnnnnnnnnnnnnnnnnnnnnnnnnnnnnnnnnnnnnnnnnnnnnnnnnnnnnnnnnnnnnnnnnnnnnnnnnnnnnnnnnnnnnnnnnnnnnnnnnnnnnnnnnnnnnnnnnnnnnnnnnnnnnnnnnnnnnnnnnnnnnnnnnnnnnnnnnnnnnnnnnnnnnnnnnnnnnnnnnnnnnnnnnnnnnnnnnnnnnnnnnnnnnnnnnnnnnnnnnnnnnnnnnnnnnnnnnnnnnnnnnnnnnnnnnnnnnnnnnnnnnnnnnnnnnnnnnnnnnnnnnnnnnnnnnnnnnnnnnnnnnnnnnnnnnnnnnnnnnnnnnnnnnnnnnnnnnnnnnnnnnnnnnnnnnnnnnnnnnnnnnnnnnnnnnnnnnnnnnnnnnnnnnnnnnnnnnnnnnnnnnnnnnnnnnnnnnnnnnnnnnnnnnnnnnnnnnnnnnnnnnnnnnnnnnnnnnnnnnnnnnnnnnnnnnnnnnnnnnnnnnnnnnnnnnnnnnnnnnnnnnnnnnnnnnnnnnnnnnnnnnnnnnnnnnnnnnnnnnnnnnnnnnnnnnnnnnnnnnnnnnnnnnnnnnnnnnnnnnnnnnnnnnnnnnnnnnnnnnnnnnnnnnnnnnnnnnnnnnnnnnnnnnnnnnnnnnnnnnnnnnnnnnnnnnnnnnnnnnnnnnnnnnnnnnnnnnnnnnnnnnnnnnnnnnnnnnnnnnnnnnnnnnnnnnnnnnnnnnnnnnnnnnnnnnnnnnnnnnnnnnnnnnnnnnnnnnnnnnnnnnnnnnnnnnnnnnnnnnnnnnnnnnnnnnnnnnnnnnnnnnnnnnnnnnnnnnnnnnnnnnnnnnnnnnnnnnnnnnnnnnnnnnnnnnnnnnnnnnnnnnnnnnnnnnnnnnnnnnnnnnnnnnnnnnnnnnnnnnnnnnnnnnnnnnnnnnnnnnnnnnnnnnnnnnnnnnnnnnnnnnnnnnnnnnnnnnnnnnnnnnnnnnnnnnnnnnnnnnnnnnnnnnnnnnnnnnnnnnnnnnnnnnnnnnnnnnnnnnnnnnnnnnnnnnnnnnnnnnnnnnnnnnnnnnnnnnnnnnnnnnnnnnnnnnnnnnnnnnnnnnnnnnnnnnnnnnnnnnnnnnnnnnnnnnnnnnnnnnnnnnnnnnnnnnnnnnnnnnnnnnnnnnnnnnnnnnnnnnnnnnnnnnnnnnnnnnnnnnnnnnnnnnnnnnnnnnnnnnnnnnnnnnnnnnnnnnnnnnnnnnnnnnnnnnnnnnnnnnnnnnnnnnnnnnnnnnnnnnnnnnnnnnnnnnnnnnnnnnnnnnnnnnnnnnnnnnnnnnnnnnnnnnnnnnnnnnnnnnnnnnnnnnnnnnnnnnnnnnnnnnnnnnnnnnnnnnnnnnnnnnnnnnnnnnnnnnnnnnnnnnnnnnnnnnnnnnnnnnnnnnnnnnnnnnnnnnnnnnnnnnnnnnnnnnnnnnnnnnnnnnnnnnnnnnnnnnnnnnnnnnnnnnnnnnnnnnnnnnnnnnnnnnnnnnnnnnnnnnnnnnnnnnnnnnnnnnnnnnnnnnnnnnnnnnnnnnnnnnnnnnnnnnnnnnnnnnnnnnnnnnnnnnnnnnnnnnnnnnnnnnnnnnnnnnnnnnnnnnnnnnnnnnnnnnnnnnnnnnnnnnnnnnnnnnnnnnnnnnnnnnnnnnnnnnnnnnnnnnnnnnnnnnnnnnnnnnnnnnnnnnnnnnnnnnnnnnnnnnnnnnnnnnnnnnnnnnnnnnnnnnnnnnnnnnnnnnnnnnnnnnnnnnnnnnnnnnnnnnnnnnnnnnnnnnnnnnnnnnnnnnnnnnnnnnnnnnnnnnnnnnnnnnnnnnnnnnnnnnnnnnnnnnnnnnnnnnnnnnnnnnnnnnnnnnnnnnnnnnnnnnnnnnnnnnnnnnnnnnnnnnnnnnnnnnnnnnnnnnnnnnnnnnnnnnnnnnnnnnnnnnnnnnnnnnnnnnnnnnnnnnnnnnnnnnnnnnnnnnnnnnnnnnnnnnnnnnnnnnnnnnnnnnnnnnnnnnnnnnnnnnnnnnnnnnnnnnnnnnnnnnnnnnnnnnnnnnnnnnnnnnnnnnnnnnnnnnnnnnnnnnnnnnnnnnnnnnnnnnnnnnnnnnnnnnnnnnnnnnnnnnnnnnnnnnnnnnnnnnnnnnnnnnnnnnnnnnnnnnnnnnnnnnnnnnnnnnnnnnnnnnnnnnnnnnnnnnnnnnnnnnnnnnnnnnnnnnnnnnnnnnnnnnnnnnnnnnnnnnnnnnnnnnnnnnnnnnnnnnnnnnnnnnnnnnnnnnnnnnnnnnnnnnnnnnnnnnnnnnnnnnnnnnnnnnnnnnnnnnnnnnnnnnnnnnnnnnnnnnnnnnnnnnnnnnnnnnnnnnnnnnnnnnnnnnnnnnnnnnnnnnnnnnnnnnnnnnnnnnnnnnnnnnnnnnnnnnnnnnnnnnnnnnnnnnnnnnnnnnnnnnnnnnnnnnnnnnnnnnnnnnnnnnnnnnnnnnnnnnnnnnnnnnnnnnnnnnnnnnnnnnnnnnnnnnnnnnnnnnnnnnnnnnnnnnnnnnnnnnnnnnnnnnnnnnnnnnnnnnnnnnnnnnnnnnnnnnnnnnnnnnnnnnnnnnnnnnnnnnnnnnnnnnnnnnnnnnnnnnnnnnnnnnnnnnnnnnnnnnnnnnnnnnnnnnnnnnnnnnnnnnnnnnnnnnnnnnnnnnnnnnnnnnnnnnnnnnnnnnnnnnnnnnnnnnnnnnnnnnnnnnnnnnnnnnnnnnnnnnnnnnnnnnnnnnnnnnnnnnnnnnnnnnnnnnnnnnnnnnnnnnnnnnnnnnnnnnnnnnnnnnnnnnnnnnnnnnnnnnnnnnnnnnnnnnnnnnnnnnnnnnnnnnnnnnnnnnnnnnnnnnnnnnnnnnnnnnnnnnnnnnnnnnnnnnnnnnnnnnnnnnnnnnnnnnnnnnnnnnnnnnnnnnnnnnnnnnnnnnnnnnnnnnnnnnnnnnnnnnnnnnnnnnnnnnnnnnnnnnnnnnnnnnnnnnnnnnnnnnnnnnnnnnnnnnnnnnnnnnnnnnnnnnnnnnnnnnnnnnnnnnnnnnnnnnnnnnnnnnnnnnnnnnnnnnnnnnnnnnnnnnnnnnnnnnnnnnnnnnnnnnnnnnnnnnnnnnnnnnnnnnnnnnnnnnnnnnnnnnnnnnnnnnnnnnnnnnnnnnnnnnnnnnnnnnnnnnnnnnnnnnnnnnnnnnnnnnnnnnnnnnnnnnnnnnnnnnnnnnnnnnnnnnnnnnnnnnnnnnnnnnnnnnnnnnnnnnnnnnnnnnnnnnnnnnnnnnnnnnnnnnnnnnnnnnnnnnnnnnnnnnnnnnnnnnnnnnnnnnnnnnnnnnnnnnnnnnnnnnnnnnnnnnnnnnnnnnnnnnnnnnnnnnnnnnnnnnnnnnnnnnnnnnnnnnnnnnnnnnnnnnnnnnnnnnnnnnnnnnnnnnnnnnnnnnnnnnnnnnnnnnnnnnnnnnnnnnnnnnnnnnnnnnnnnnnnnnnnnnnnnnnnnnnnnnnnnnnnnnnnnnnnnnnnnnnnnnnnnnnnnnnnnnnnnnnnnnnnnnnnnnnnnnnnnnnnnnnnnnnnnnnnnnnnnnnnnnnnnnnnnnnnnnnnnnnnnnnnnnnnnnnnnnnnnnnnnnnnnnnnnnnnnnnnnnnnnnnnnnnnnnnnnnnnnnnnnnnnnnnnnnnnnnnnnnnnnnnnnnnnnnnnnnnnnnnnnnnnnnnnnnnnnnnnnnnnnnnnnnnnnnnnnnnnnnnnnnnnnnnnnnnnnnnnnnnnnnnnnnnnnnnnnnnnnnnnnnnnnnnnnnnnnnnnnnnnnnnnnnnnnnnnnnnnnnnnnnnnnnnnnnnnnnnnnnnnnnnnnnnnnnnnnnnnnnnnnnnnnnnnnnnnnnnnnnnnnnnnnnnnnnnnnnnnnnnnnnnnnnnnnnnnnnnnnnnnnnnnnnnnnnnnnnnnnnnnnnnnnnnnnnnnnnnnnnnnnnnnnnnnnnnnnnnnnnnnnnnnnnnnnnnnnnnnnnnnnnnnnnnnnnnnnnnnnnnnnnnnnnnnnnnnnnnnnnnnnnnnnnnnnnnnnnnnnnnnnnnnnnnnnnnnnnnnnnnnnnnnnnnnnnnnnnnnnnnnnnnnnnnnnnnnnnnnnnnnnnnnnnnnnnnnnnnnnnnnnnnnnnnnnnnnnnnnnnnnnnnnnnnnnnnnnnnnnnnnnnnnnnnnnnnnnnnnnnnnnnnnnnnnnnnnnnnnnnnnnnnnnnnnnnnnnnnnnnnnnnnnnnnnnnnnnnnnnnnnnnnnnnnnnnnnnnnnnnnnnnnnnnnnnnnnnnnnnnnnnnnnnnnnnnnnnnnnnnnnnnnnnnnnnnnnnnnnnnnnnnnnnnnnnnnnnnnnnnnnnnnnnnnnnnnnnnnnnnnnnnnnnnnnnnnnnnnnnnnnnnnnnnnnnnnnnnnnnnnnnnnnnnnnnnnnnnnnnnnnnnnnnnnnnnnnnnnnnnnnnnnnnnnnnnnnnnnnnnnnnnnnnnnnnnnnnnnnnnnnnnnnnnnnnnnnnnnnnnnnnnnnnnnnnnnnnnnnnnnnnnnnnnnnnnnnnnnnnnnnnnnnnnnnnnnnnnnnnnnnnnnnnnnnnnnnnnnnnnnnnnnnnnnnnnnnnnnnnnnnnnnnnnnnnnnnnnnnnnnnnnnnnnnnnnnnnnnnnnnnnnnnnnnnnnnnnnnnnnnnnnnnnnnnnnnnnnnnnnnnnnnnnnnnnnnnnnnnnnnnnnnnnnnnnnnnnnnnnnnnnnnnnnnnnnnnnnnnnnnnnnnnnnnnnnnnnnnnnnnnnnnnnnnnnnnnnnnnnnnnnnnnnnnnnnnnnnnnnnnnnnnnnnnnnnnnnnnnnnnnnnnnnnnnnnnnnnnnnnnnnnnnnnnnnnnnnnnnnnnnnnnnnnnnnnnnnnnnnnnnnnnnnnnnnnnnnnnnnnnnnnnnnnnnnnnnnnnnnnnnnnnnnnnnnnnnnnnnnnnnnnnnnnnnnnnnnnnnnnnnnnnnnnnnnnnnnnnnnnnnnnnnnnnnnnnnnnnnnnnnnnnnnnnnnnnnnnnnnnnnnnnnnnnnnnnnnnnnnnnnnnnnnnnnnnnnnnnnnnnnnnnnnnnnnnnnnnnnnnnnnnnnnnnnnnnnnnnnnnnnnnnnnnnnnnnnnnnnnnnnnnnnnnnnnnnnnnnnnnnnnnnnnnnnnnnnnnnnnnnnnnnnnnnnnnnnnnnnnnnnnnnnnnnnnnnnnnnnnnnnnnnnnnnnnnnnnnnnnnnnnnnnnnnnnnnnnnnnnnnnnnnnnnnnnnnnnnnnnnnnnnnnnnnnnnnnnnnnnnnnnnnnnnnnnnnnnnnnnnnnnnnnnnnnnnnnnnnnnnnnnnnnnnnnnnnnnnnnnnnnnnnnnnnnnnnnnnnnnnnnnnnnnnnnnnnnnnnnnnnnnnnnnnnnnnnnnnnnnnnnnnnnnnnnnnnnnnnnnnnnnnnnnnnnnnnnnnnnnnnnnnnnnnnnnnnnnnnnnnnnnnnnnnnnnnnnnnnnnnnnnnnnnnnnnnnnnnnnnnnnnnnnnnnnnnnnnnnnnnnnnnnnnnnnnnnnnnnnnnnnnnnnnnnnnnnnnnnnnnnnnnnnnnnnnnnnnnnnnnnnnnnnnnnnnnnnnnnnnnnnnnnnnnnnnnnnnnnnnnnnnnnnnnnnnnnnnnnnnnnnnnnnnnnnnnnnnnnnnnnnnnnnnnnnnnnnnnnnnnnnnnnnnnnnnnnnnnnnnnnnnnnnnnnnnnnnnnnnnnnnnnnnnnnnnnnnnnnnnnnnnnnnnnnnnnnnnnnnnnnnnnnnnnnnnnnnnnnnnnnnnnnnnnnnnnnnnnnnnnnnnnnnnnnnnnnnnnnnnnnnnnnnnnnnnnnnnnnnnnnnnnnnnnnnnnnnnnnnnnnnnnnnnnnnnnnnnnnnnnnnnnnnnnnnnnnnnnnnnnnnnnnnnnnnnnnnnnnnnnnnnnnnnnnnnnnnnnnnnnnnnnnnnnnnnnnnnnnnnnnnnnnnnnnnnnnnnnnnnnnnnnnnnnnnnnnnnnnnnnnnnnnnnnnnnnnnnnnnnnnnnnnnnnnnnnnnnnnnnnnnnnnnnnnnnnnnnnnnnnnnnnnnnnnnnnnnnnnnnnnnnnnnnnnnnnnnnnnnnnnnnnnnnnnnnnnnnnnnnnnnnnnnnnnnnnnnnnnnnnnnnnnnnnnnnnnnnnnnnnnnnnnnnnnnnnnnnnnnnnnnnnnnnnnnnnnnnnnnnnnnnnnnnnnnnnnnnnnnnnnnnnnnnnnnnnnnnnnnnnnnnnnnnnnnnnnnnnnnnnnnnnnnnnnnnnnnnnnnnnnnnnnnnnnnnnnnnnnnnnnnnnnnnnnnnnnnnnnnnnnnnnnnnnnnnnnnnnnnnnnnnnnnnnnnnnnnnnnnnnnnnnnnnnnnnnnnnnnnnnnnnnnnnnnnnnnnnnnnnnnnnnnnnnnnnnnnnnnnnnnnnnnnnnnnnnnnnnnnnnnnnnnnnnnnnnnnnnnnnnnnnnnnnnnnnnnnnnnnnnnnnnnnnnnnnnnnnnnnnnnnnnnnnnnnnnnnnnnnnnnnnnnnnnnnnnnnnnnnnnnnnnnnnnnnnnnnnnnnnnnnnnnnnnnnnnnnnnnnnnnnnnnnnnnnnnnnnnnnnnnnnnnnnnnnnnnnnnnnnnnnnnnnnnnnnnnnnnnnnnnnnnnnnnnnnnnnnnnnnnnnnnnnnnnnnnnnnnnnnnnnnnnnnnnnnnnnnnnnnnnnnnnnnnnnnnnnnnnnnnnnnnnnnnnnnnnnnnnnnnnnnnnnnnnnnnnnnnnnnnnnnnnnnnnnnnnnnnnnnnnnnnnnnnnnnnnnnnnnnnnnnnnnnnnnnnnnnnnnnnnnnnnnnnnnnnnnnnnnnnnnnnnnnnnnnnnnnnnnnnnnnnnnnnnnnnnnnnnnnnnnnnnnnnnnnnnnnnnnnnnnnnnnnnnnnnnnnnnnnnnnnnnnnnnnnnnnnnnnnnnnnnnnnnnnnnnnnnnnnnnnnnnnnnnnnnnnnnnnnnnnnnnnnnnnnnnnnnnnnnnnnnnnnnnnnnnnnnnnnnnnnnnnnnnnnnnnnnnnnnnnnnnnnnnnnnnnnnnnnnnnnnnnnnnnnnnnnnnnnnnnnnnnnnnnnnnnnnnnnnnnnnnnnnnnnnnnnnnnnnnnnnnnnnnnnnnnnnnnnnnnnnnnnnnnnnnnnnnnnnnnnnnnnnnnnnnnnnnnnnnnnnnnnnnnnnnnnnnnnnnnnnnnnnnnnnnnnnnnnnnnnnnnnnnnnnnnnnnnnnnnnnnnnnnnnnnnnnnnnnnnnnnnnnnnnnnnnnnnnnnnnnnnnnnnnnnnnnnnnnnnnnnnnnnnnnnnnnnnnnnnnnnnnnnnnnnnnnnnnnnnnnnnnnnnnnnnnnnnnnnnnnnnnnnnnnnnnnnnnnnnnnnnnnnnnnnnnnnnnnnnnnnnnnnnnnnnnnnnnnnnnnnnnnnnnnnnnnnnnnnnnnnnnnnnnnnnnnnnnnnnnnnnnnnnnnnnnnnnnnnnnnnnnnnnnnnnnnnnnnnnnnnnnnnnnnnnnnnnnnnnnnnnnnnnnnnnnnnnnnnnnnnnnnnnnnnnnnnnnnnnnnnnnnnnnnnnnnnnnnnnnnnnnnnnnnnnnnnnnnnnnnnnnnnnnnnnnnnnnnnnnnnnnnnnnnnnnnnnnnnnnnnnnnnnnnnnnnnnnnnnnnnnnnnnnnnnnnnnnnnnnnnnnnnnnnnnnnnnnnnnnnnnnnnnnnnnnnnnnnnnnnnnnnnnnnnnnnnnnnnnnnnnnnnnnnnnnnnnnnnnnnnnnnnnnnnnnnnnnnnnnnnnnnnnnnnnnnnnnnnnnnnnnnnnnnnnnnnnnnnnnnnnnnnnnnnnnnnnnnnnnnnnnnnnnnnnnnnnnnnnnnnnnnnnnnnnnnnnnnnnnnnnnnnnnnnnnnnnnnnnnnnnnnnnnnnnnnnnnnnnnnnnnnnnnnnnnnnnnnnnnnnnnnnnnnnnnnnnnnnnnnnnnnnnnnnnnnnnnnnnnnnnnnnnnnnnnnnnnnnnnnnnnnnnnnnnnnnnnnnnnnnnnnnnnnnnnnnnnnnnnnnnnnnnnnnnnnnnnnnnnnnnnnnnnnnnnnnnnnnnnnnnnnnnnnnnnnnnnnnnnnnnnnnnnnnnnnnnnnnnnnnnnnnnnnnnnnnnnnnnnnnnnnnnnnnnnnnnnnnnnnnnnnnnnnnnnnnnnnnnnnnnnnnnnnnnnnnnnnnnnnnnnnnnnnnnnnnnnnnnnnnnnnnnnnnnnnnnnnnnnnnnnnnnnnnnnnnnnnnnnnnnnnnnnnnnnnnnnnnnnnnnnnnnnnnnnnnnnnnnnnnnnnnnnnnnnnnnnnnnnnnnnnnnnnnnnnnnnnnnnnnnnnnnnnnnnnnnnnnnnnnnnnnnnnnnnnnnnnnnnnnnnnnnnnnnnnnnnnnnnnnnnnnnnnnnnnnnnnnnnnnnnnnnnnnnnnnnnnnnnnnnnnnnnnnnnnnnnnnnnnnnnnnnnnnnnnnnnnnnnnnnnnnnnnnnnnnnnnnnnnnnnnnnnnnnnnnnnnnnnnnnnnnnnnnnnnnnnnnnnnnnnnnnnnnnnnnnnnnnnnnnnnnnnnnnnnnnnnnnnnnnnnnnnnnnnnnnnnnnnnnnnnnnnnnnnnnnnnnnnnnnnnnnnnnnnnnnnnnnnnnnnnnnnnnnnnnnnnnnnnnnnnnnnnnnnnnnnnnnnnnnnnnnnnnnnnnnnnnnnnnnnnnnnnnnnnnnnnnnnnnnnnnnnnnnnnnnnnnnnnnnnnnnnnnnnnnnnnnnnnnnnnnnnnnnnnnnnnnnnnnnnnnnnnnnnnnnnnnnnnnnnnnnnnnnnnnnnnnnnnnnnnnnnnnnnnnnnnnnnnnnnnnnnnnnnnnnnnnnnnnnnnnnnnnnnnnnnnnnnnnnnnnnnnnnnnnnnnnnnnnnnnnnnnnnnnnnnnnnnnnnnnnnnnnnnnnnnnnnnnnnnnnnnnnnnnnnnnnnnnnnnnnnnnnnnnnnnnnnnnnnnnnnnnnnnnnnnnnnnnnnnnnnnnnnnnnnnnnnnnnnnnnnnnnnnnnnnnnnnnnnnnnnnnnnnnnnnnnnnnnnnnnnnnnnnnnnnnnnnnnnnnnnnnnnnnnnnnnnnnnnnnnnnnnnnnnnnnnnnnnnnnnnnnnnnnnnnnnnnnnnnnnnnnnnnnnnnnnnnnnnnnnnnnnnnnnnnnnnnnnnnnnnnnnnnnnnnnnnnnnnnnnnnnnnnnnnnnnnnnnnnnnnnnnnnnnnnnnnnnnnnnnnnnnnnnnnnnnnnnnnnnnnnnnnnnnnnnnnnnnnnnnnnnnnnnnnnnnnnnnnnnnnnnnnnnnnnnnnnnnnnnnnnnnnnnnnnnnnnnnnnnnnnnnnnnnnnnnnnnnnnnnnnnnnnnnnnnnnnnnnnnnnnnnnnnnnnnnnnnnnnnnnnnnnnnnnnnnnnnnnnnnnnnnnnnnnnnnnnnnnnnnnnnnnnnnnnnnnnnnnnnnnnnnnnnnnnnnnnnnnnnnnnnnnnnnnnnnnnnnnnnnnnnnnnnnnnnnnnnnnnnnnnnnnnnnnnnnnnnnnnnnnnnnnnnnnnnnnnnnnnnnnnnnnnnnnnnnnnnnnnnnnnnnnnnnnnnnnnnnnnnnnnnnnnnnnnnnnnnnnnnnnnnnnnnnnnnnnnnnnnnnnnnnnnnnnnnnnnnnnnnnnnnnnnnnnnnnnnnnnnnnnnnnnnnnnnnnnnnnnnnnnnnnnnnnnnnnnnnnnnnnnnnnnnnnnnnnnnnnnnnnnnnnnnnnnnnnnnnnnnnnnnnnnnnnnnnnnnnnnnnnnnnnnnnnnnnnnnnnnnnnnnnnnnnnnnnnnnnnnnnnnnnnnnnnnnnnnnnnnnnnnnnnnnnnnnnnnnnnnnnnnnnnnnnnnnnnnnnnnnnnnnnnnnnnnnnnnnnnnnnnnnnnnnnnnnnnnnnnnnnnnnnnnnnnnnnnnnnnnnnnnnnnnnnnnnnnnnnnnnnnnnnnnnnnnnnnnnnnnnnnnnnnnnnnnnnnnnnnnnnnnnnnnnnnnnnnnnnnnnnnnnnnnnnnnnnnnnnnnnnnnnnnnnnnnnnnnnnnnnnnnnnnnnnnnnnnnnnnnnnnnnnnnnnnnnnnnnnnnnnnnnnnnnnnnnnnnnnnnnnnnnnnnnnnnnnnnnnnnnnnnnnnnnnnnnnnnnnnnnnnnnnnnnnnnnnnnnnnnnnnnnnnnnnnnnnnnnnnnnnnnnnnnnnnnnnnnnnnnnnnnnnnnnnnnnnnnnnnnnnnnnnnnnnnnnnnnnnnnnnnnnnnnnnnnnnnnnnnnnnnnnnnnnnnnnnnnnnnnnnnnnnnnnnnnnnnnnnnnnnnnnnnnnnnnnnnnnnnnnnnnnnnnnnnnnnnnnnnnnnnnnnnnnnnnnnnnnnnnnnnnnnnnnnnnnnnnnnnnnnnnnnnnnnnnnnnnnnnnnnnnnnnnnnnnnnnnnnnnnnnnnnnnnnnnnnnnnnnnnnnnnnnnnnnnnnnnnnnnnnnnnnnnnnnnnnnnnnnnnnnnnnnnnnnnnnnnnnnnnnnnnnnnnnnnnnnnnnnnnnnnnnnnnnnnnnnnnnnnnnnnnnnnnnnnnnnnnnnnnnnnnnnnnnnnnnnnnnnnnnnnnnnnnnnnnnnnnnnnnnnnnnnnnnnnnnnnnnnnnnnnnnnnnnnnnnnnnnnnnnnnnnnnnnnnnnnnnnnnnnnnnnnnnnnnnnnnnnnnnnnnnnnnnnnnnnnnnnnnnnnnnnnnnnnnnnnnnnnnnnnnnnnnnnnnnnnnnnnnnnnnnnnnnnnnnnnnnnnnnnnnnnnnnnnnnnnnnnnnnnnnnnnnnnnnnnnnnnnnnnnnnnnnnnnnnnnnnnnnnnnnnnnnnnnnnnnnnnnnnnnnnnnnnnnnnnnnnnnnnnnnnnnnnnnnnnnnnnnnnnnnnnnnnnnnnnnnnnnnnnnnnnnnnnnnnnnnnnnnnnnnnnnnnnnnnnnnnnnnnnnnnnnnnnnnnnnnnnnnnnnnnnnnnnnnnnnnnnnnnnnnnnnnnnnnnnnnnnnnnnnnnnnnnnnnnnnnnnnnnnnnnnnnnnnnnnnnnnnnnnnnnnnnnnnnnnnnnnnnnnnnnnnnnnnnnnnnnnnnnnnnnnnnnnnnnnnnnnnnnnnnnnnnnnnnnnnnnnnnnnnnnnnnnnnnnnnnnnnnnnnnnnnnnnnnnnnnnnnnnnnnnnnnnnnnnnnnnnnnnnnnnnnnnnnnnnnnnnnnnnnnnnnnnnnnnnnnnnnnnnnnnnnnnnnnnnnnnnnnnnnnnnnnnnnnnnnnnnnnnnnnnnnnnnnnnnnnnnnnnnnnnnnnnnnnnnnnnnnnnnnnnnnnnnnnnnnnnnnnnnnnnnnnnnnnnnnnnnnnnnnnnnnnnnnnnnnnnnnnnnnnnnnnnnnnnnnnnnnnnnnnnnnnnnnnnnnnnnnnnnnnnnnnnnnnnnnnnnnnnnnnnnnnnnnnnnnnnnnnnnnnnnnnnnnnnnnnnnnnnnnnnnnnnnnnnnnnnnnnnnnnnnnnnnnnnnnnnnnnnnnnnnnnnnnnnnnnnnnnnnnnnnnnnnnnnnnnnnnnnnnnnnnnnnnnnnnnnnnnnnnnnnnnnnnnnnnnnnnnnnnnnnnnnnnnnnnnnnnnnnnnnnnnnnnnnnnnnnnnnnnnnnnnnnnnnnnnnnnnnnnnnnnnnnnnnnnnnnnnnnnnnnnnnnnnnnnnnnnnnnnnnnnnnnnnnnnnnnnnnnnnnnnnnnnnnnnnnnnnnnnnnnnnnnnnnnnnnnnnnnnnnnnnnnnnnnnnnnnnnnnnnnnnnnnnnnnnnnnnnnnnnnnnnnnnnnnnnnnnnnnnnnnnnnnnnnnnnnnnnnnnnnnnnnnnnnnnnnnnnnnnnnnnnnnnnnnnnnnnnnnnnnnnnnnnnnnnnnnnnnnnnnnnnnnnnnnnnnnnnnnnnnnnnnnnnnnnnnnnnnnnnnnnnnnnnnnnnnnnnnnnnnnnnnnnnnnnnnnnnnnnnnnnnnnnnnnnnnnnnnnnnnnnnnnnnnnnnnnnnnnnnnnnnnnnnnnnnnnnnnnnnnnnnnnnnnnnnnnnnnnnnnnnnnnnnnnnnnnnnnnnnnnnnnnnnnnnnnnnnnnnnnnnnnnnnnnnnnnnnnnnnnnnnnnnnnnnnnnnnnnnnnnnnnnnnnnnnnnnnnnnnnnnnnnnnnnnnnnnnnnnnnnnnnnnnnnnnnnnnnnnnnnnnnnnnnnnnnnnnnnnnnnnnnnnnnnnnnnnnnnnnnnnnnnnnnnnnnnnnnnnnnnnnnnnnnnnnnnnnnnnnnnnnnnnnnnnnnnnnnnnnnnnnnnnnnnnnnnnnnnnnnnnnnnnnnnnnnnnnnnnnnnnnnnnnnnnnnnnnnnnnnnnnnnnnnnnnnnnnnnnnnnnnnnnnnnnnnnnnnnnnnnnnnnnnnnnnnnnnnnnnnnnnnnnnnnnnnnnnnnnnnnnnnnnnnnnnnnnnnnnnnnnnnnnnnnnnnnnnnnnnnnnnnnnnnnnnnnnnnnnnnnnnnnnnnnnnnnnnnnnnnnnnnnnnnnnnnnnnnnnnnnnnnnnnnnnnnnnnnnnnnnnnnnnnnnnnnnnnnnnnnnnnnnnnnnnnnnnnnnnnnnnnnnnnnnnnnnnnnnnnnnnnnnnnnnnnnnnnnnnnnnnnnnnnnnnnnnnnnnnnnnnnnnnnnnnnnnnnnnnnnnnnnnnnnnnnnnnnnnnnnnnnnnnnnnnnnnnnnnnnnnnnnnnnnnnnnnnnnnnnnnnnnnnnnnnnnnnnnnnnnnnnnnnnnnnnnnnnnnnnnnnnnnnnnnnnnnnnnnnnnnnnnnnnnnnnnnnnnnnnnnnnnnnnnnnnnnnnnnnnnnnnnnnnnnnnnnnnnnnnnnnnnnnnnnnnnnnnnnnnnnnnnnnnnnnnnnnnnnnnnnnnnnnnnnnnnnnnnnnnnnnnnnnnnnnnnnnnnnnnnnnnnnnnnnnnnnnnnnnnnnnnnnnnnnnnnnnnnnnnnnnnnnnnnnnnnnnnnnnnnnnnnnnnnnnnnnnnnnnnnnnnnnnnnnnnnnnnnnnnnnnnnnnnnnnnnnnnnnnnnnnnnnnnnnnnnnnnnnnnnnnnnnnnnnnnnnnnnnnnnnnnnnnnnnnnnnnnnnnnnnnnnnnnnnnnnnnnnnnnnnnnnnnnnnnnnnnnnnnnnnnnnnnnnnnnnnnnnnnnnnnnnnnnnnnnnnnnnnnnnnnnnnnnnnnnnnnnnnnnnnnnnnnnnnnnnnnnnnnnnnnnnnnnnnnnnnnnnnnnnnnnnnnnnnnnnnnnnnnnnnnnnnnnnnnnnnnnnnnnnnnnnnnnnnnnnnnnnnnnnnnnnnnnnnnnnnnnnnnnnnnnnnnnnnnnnnnnnnnnnnnnnnnnnnnnnnnnnnnnnnnnnnnnnnnnnnnnnnnnnnnnnnnnnnnnnnnnnnnnnnnnnnnnnnnnnnnnnnnnnnnnnnnnnnnnnnnnnnnnnnnnnnnnnnnnnnnnnnnnnnnnnnnnnnnnnnnnnnnnnnnnnnnnnnnnnnnnnnnnnnnnnnnnnnnnnnnnnnnnnnnnnnnnnnnnnnnnnnnnnnnnnnnnnnnnnnnnnnnnnnnnnnnnnnnnnnnnnnnnnnnnnnnnnnnnnnnnnnnnnnnnnnnnnnnnnnnnnnnnnnnnnnnnnnnnnnnnnnnnnnnnnnnnnnnnnnnnnnnnnnnnnnnnnnnnnnnnnnnnnnnnnnnnnnnnnnnnnnnnnnnnnnnnnnnnnnnnnnnnnnnnnnnnnnnnnnnnnnnnnnnnnnnnnnnnnnnnnnnnnnnnnnnnnnnnnnnnnnnnnnnnnnnnnnnnnnnnnnnnnnnnnnnnnnnnnnnnnnnnnnnnnnnnnnnnnnnnnnnnnnnnnnnnnnnnnnnnnnnnnnnnnnnnnnnnnnnnnnnnnnnnnnnnnnnnnnnnnnnnnnnnnnnnnnnnnnnnnnnnnnnnnnnnnnnnnnnnnnnnnnnnnnnnnnnnnnnnnnnnnnnnnnnnnnnnnnnnnnnnnnnnnnnnnnnnnnnnnnnnnnnnnnnnnnnnnnnnnnnnnnnnnnnnnnnnnnnnnnnnnnnnnnnnnnnnnnnnnnnnnnnnnnnnnnnnnnnnnnnnnnnnnnnnnnnnnnnnnnnnnnnnnnnnnnnnnnnnnnnnnnnnnnnnnnnnnnnnnnnnnnnnnnnnnnnnnnnnnnnnnnnnnnnnnnnnnnnnnnnnnnnnnnnnnnnnnnnnnnnnnnnnnnnnnnnnnnnnnnnnnnnnnnnnnnnnnnnnnnnnnnnnnnnnnnnnnnnnnnnnnnnnnnnnnnnnnnnnnnnnnnnnnnnnnnnnnnnnnnnnnnnnnnnnnnnnnnnnnnnnnnnnnnnnnnnnnnnnnnnnnnnnnnnnnnnnnnnnnnnnnnnnnnnnnnnnnnnnnnnnnnnnnnnnnnnnnnnnnnnnnnnnnnnnnnnnnnnnnnnnnnnnnnnnnnnnnnnnnnnnnnnnnnnnnnnnnnnnnnnnnnnnnnnnnnnnnnnnnnnnnnnnnnnnnnnnnnnnnnnnnnnnnnnnnnnnnnnnnnnnnnnnnnnnnnnnnnnnnnnnnnnnnnnnnnnnnnnnnnnnnnnnnnnnnnnnnnnnnnnnnnnnnnnnnnnnnnnnnnnnnnnnnnnnnnnnnnnnnnnnnnnnnnnnnnnnnnnnnnnnnnnnnnnnnnnnnnnnnnnnnnnnnnnnnnnnnnnnnnnnnnnnnnnnnnnnnnnnnnnnnnnnnnnnnnnnnnnnnnnnnnnnnnnnnnnnnnnnnnnnnnnnnnnnnnnnnnnnnnnnnnnnnnnnnnnnnnnnnnnnnnnnnnnnnnnnnnnnnnnnnnnnnnnnnnnnnnnnnnnnnnnnnnnnnnnnnnnnnnnnnnnnnnnnnnnnnnnnnnnnnnnnnnnnnnnnnnnnnnnnnnnnnnnnnnnnnnnnnnnnnnnnnnnnnnnnnnnnnnnnnnnnnnnnnnnnnnnnnnnnnnnnnnnnnnnnnnnnnnnnnnnnnnnnnnnnnnnnnnnnnnnnnnnnnnnnnnnnnnnnnnnnnnnnnnnnnnnnnnnnnnnnnnnnnnnnnnnnnnnnnnnnnnnnnnnnnnnnnnnnnnnnnnnnnnnnnnnnnnnnnnnnnnnnnnnnnnnnnnnnnnnnnnnnnnnnnnnnnnnnnnnnnnnnnnnnnnnnnnnnnnnnnnnnnnnnnnnnnnnnnnnnnnnnnnnnnnnnnnnnnnnnnnnnnnnnnnnnnnnnnnnnnnnnnnnnnnnnnnnnnnnnnnnnnnnnnnnnnnnnnnnnnnnnnnnnnnnnnnnnnnnnnnnnnnnnnnnnnnnnnnnnnnnnnnnnnnnnnnnnnnnnnnnnnnnnnnnnnnnnnnnnnnnnnnnnnnnnnnnnnnnnnnnnnnnnnnnnnnnnnnnnnnnnnnnnnnnnnnnnnnnnnnnnnnnnnnnnnnnnnnnnnnnnnnnnnnnnnnnnnnnnnnnnnnnnnnnnnnnnnnnnnnnnnnnnnnnnnnnnnnnnnnnnnnnnnnnnnnnnnnnnnnnnnnnnnnnnnnnnnnnnnnnnnnnnnnnnnnnnnnnnnnnnnnnnnnnnnnnnnnnnnnnnnnnnnnnnnnnnnnnnnnnnnnnnnnnnnnnnnnnnnnnnnnnnnnnnnnnnnnnnnnnnnnnnnnnnnnnnnnnnnnnnnnnnnnnnnnnnnnnnnnnnnnnnnnnnnnnnnnnnnnnnnnnnnnnnnnnnnnnnnnnnnnnnnnnnnnnnnnnnnnnnnnnnnnnnnnnnnnnnnnnnnnnnnnnnnnnnnnnnnnnnnnnnnnnnnnnnnnnnnnnnnnnnnnnnnnnnnnnnnnnnnnnnnnnnnnnnnnnnnnnnnnnnnnnnnnnnnnnnnnnnnnnnnnnnnnnnnnnnnnnnnnnnnnnnnnnnnnnnnnnnnnnnnnnnnnnnnnnnnnnnnnnnnnnnnnnnnnnnnnnnnnnnnnnnnnnnnnnnnnnnnnnnnnnnnnnnnnnnnnnnnnnnnnnnnnnnnnnnnnnnnnnnnnnnnnnnnnnnnnnnnnnnnnnnnnnnnnnnnnnnnnnnnnnnnnnnnnnnnnnnnnnnnnnnnnnnnnnnnnnnnnnnnnnnnnnnnnnnnnnnnnnnnnnnnnnnnnnnnnnnnnnnnnnnnnnnnnnnnnnnnnnnnnnnnnnnnnnnnnnnnnnnnnnnnnnnnnnnnnnnnnnnnnnnnnnnnnnnnnnnnnnnnnnnnnnnnnnnnnnnnnnnnnnnnnnnnnnnnnnnnnnnnnnnnnnnnnnnnnnnnnnnnnnnnnnnnnnnnnnnnnnnnnnnnnnnnnnnnnnnnnnnnnnnnnnnnnnnnnnnnnnnnnnnnnnnnnnnnnnnnnnnnnnnnnnnnnnnnnnnnnnnnnnnnnnnnnnnnnnnnnnnnnnnnnnnnnnnnnnnnnnnnnnnnnnnnnnnnnnnnnnnnnnnnnnnnnnnnnnnnnnnnnnnnnnnnnnnnnnnnnnnnnnnnnnnnnnnnnnnnnnnnnnnnnnnnnnnnnnnnnnnnnnnnnnnnnnnnnnnnnnnnnnnnnnnnnnnnnnnnnnnnnnnnnnnnnnnnnnnnnnnnnnnnnnnnnnnnnnnnnnnnnnnnnnnnnnnnnnnnnnnnnnnnnnnnnnnnnnnnnnnnnnnnnnnnnnnnnnnnnnnnnnnnnnnnnnnnnnnnnnnnnnnnnnnnnnnnnnnnnnnnnnnnnnnnnnnnnnnnnnnnnnnnnnnnnnnnnnnnnnnnnnnnnnnnnnnnnnnnnnnnnnnnnnnnnnnnnnnnnnnnnnnnnnnnnnnnnnnnnnnnnnnnnnnnnnnnnnnnnnnnnnnnnnnnnnnnnnnnnnnnnnnnnnnnnnnnnnnnnnnnnnnnnnnnnnnnnnnnnnnnnnnnnnnnnnnnnnnnnnnnnnnnnnnnnnnnnnnnnnnnnnnnnnnnnnnnnnnnnnnnnnnnnnnnnnnnnnnnnnnnnnnnnnnnnnnnnnnnnnnnnnnnnnnnnnnnnnnnnnnnnnnnnnnnnnnnnnnnnnnnnnnnnnnnnnnnnnnnnnnnnnnnnnnnnnnnnnnnnnnnnnnnnnnnnnnnnnnnnnnnnnnnnnnnnnnnnnnnnnnnnnnnnnnnnnnnnnnnnnnnnnnnnnnnnnnnnnnnnnnnnnnnnnnnnnnnnnnnnnnnnnnnnnnnnnnnnnnnnnnnnnnnnnnnnnnnnnnnnnnnnnnnnnnnnnnnnnnnnnnnnnnnnnnnnnnnnnnnnnnnnnnnnnnnnnnnnnnnnnnnnnnnnnnnnnnnnnnnnnnnnnnnnnnnnnnnnnnnnnnnnnnnnnnnnnnnnnnnnnnnnnnnnnnnnnnnnnnnnnnnnnnnnnnnnnnnnnnnnnnnnnnnnnnnnnnnnnnnnnnnnnnnnnnnnnnnnnnnnnnnnnnnnnnnnnnnnnnnnnnnnnnnnnnnnnnnnnnnnnnnnnnnnnnnnnnnnnnnnnnnnnnnnnnnnnnnnnnnnnnnnnnnnnnnnnnnnnnnnnnnnnnnnnnnnnnnnnnnnnnnnnnnnnnnnnnnnnnnnnnnnnnnnnnnnnnnnnnnnnnnnnnnnnnnnnnnnnnnnnnnnnnnnnnnnnnnnnnnnnnnnnnnnnnnnnnnnnnnnnnnnnnnnnnnnnnnnnnnnnnnnnnnnnnnnnnnnnnnnnnnnnnnnnnnnnnnnnnnnnnnnnnnnnnnnnnnnnnnnnnnnnnnnnnnnnnnnnnnnnnnnnnnnnnnnnnnnnnnnnnnnnnnnnnnnnnnnnnnnnnnnnnnnnnnnnnnnnnnnnnnnnnnnnnnnnnnnnnnnnnnnnnnnnnnnnnnnnnnnnnnnnnnnnnnnnnnnnnnnnnnnnnnnnnnnnnnnnnnnnnnnnnnnnnnnnnnnnnnnnnnnnnnnnnnnnnnnnnnnnnnnnnnnnnnnnnnnnnnnnnnnnnnnnnnnnnnnnnnnnnnnnnnnnnnnnnnnnnnnnnnnnnnnnnnnnnnnnnnnnnnnnnnnnnnnnnnnnnnnnnnnnnnnnnnnnnnnnnnnnnnnnnnnnnnnnnnnnnnnnnnnnnnnnnnnnnnnnnnnnnnnnnnnnnnnnnnnnnnnnnnnnnnnnnnnnnnnnnnnnnnnnnnnnnnnnnnnnnnnnnnnnnnnnnnnnnnnnnnnnnnnnnnnnnnnnnnnnnnnnnnnnnnnnnnnnnnnnnnnnnnnnnnnnnnnnnnnnnnnnnnnnnnnnnnnnnnnnnnnnnnnnnnnnnnnnnnnnnnnnnnnnnnnnnnnnnnnnnnnnnnnnnnnnnnnnnnnnnnnnnnnnnnnnnnnnnnnnnnnnnnnnnnnnnnnnnnnnnnnnnnnnnnnnnnnnnnnnnnnnnnnnnnnnnnnnnnnnnnnnnnnnnnnnnnnnnnnnnnnnnnnnnnnnnnnnnnnnnnnnnnnnnnnnnnnnnnnnnnnnnnnnnnnnnnnnnnnnnnnnnnnnnnnnnnnnnnnnnnnnnnnnnnnnnnnnnnnnnnnnnnnnnnnnnnnnnnnnnnnnnnnnnnnnnnnnnnnnnnnnnnnnnnnnnnnnnnnnnnnnnnnnnnnnnnnnnnnnnnnnnnnnnnnnnnnnnnnnnnnnnnnnnnnnnnnnnnnnnnnnnnnnnnnnnnnnnnnnnnnnnnnnnnnnnnnnnnnnnnnnnnnnnnnnnnnnnnnnnnnnnnnnnnnnnnnnnnnnnnnnnnnnnnnnnnnnnnnnnnnnnnnnnnnnnnnnnnnnnnnnnnnnnnnnnnnnnnnnnnnnnnnnnnnnnnnnnnnnnnnnnnnnnnnnnnnnnnnnnnnnnnnnnnnnnnnnnnnnnnnnnnnnnnnnnnnnnnnnnnnnnnnnnnnnnnnnnnnnnnnnnnnnnnnnnnnnnnnnnnnnnnnnnnnnnnnnnnnnnnnnnnnnnnnnnnnnnnnnnnnnnnnnnnnnnnnnnnnnnnnnnnnnnnnnnnnnnnnnnnnnnnnnnnnnnnnnnnnnnnnnnnnnnnnnnnnnnnnnnnnnnnnnnnnnnnnnnnnnnnnnnnnnnnnnnnnnnnnnnnnnnnnnnnnnnnnnnnnnnnnnnnnnnnnnnnnnnnnnnnnnnnnnnnnnnnnnnnnnnnnnnnnnnnnnnnnnnnnnnnnnnnnnnnnnnnnnnnnnnnnnnnnnnnnnnnnnnnnnnnnnnnnnnnnnnnnnnnnnnnnnnnnnnnnnnnnnnnnnnnnnnnnnnnnnnnnnnnnnnnnnnnnnnnnnnnnnnnnnnnnnnnnnnnnnnnnnnnnnnnnnnnnnnnnnnnnnnnnnnnnnnnnnnnnnnnnnnnnnnnnnnnnnnnnnnnnnnnnnnnnnnnnnnnnnnnnnnnnnnnnnnnnnnnnnnnnnnnnnnnnnnnnnnnnnnnnnnnnnnnnnnnnnnnnnnnnnnnnnnnnnnnnnnnnnnnnnnnnnnnnnnnnnnnnnnnnnnnnnnnnnnnnnnnnnnnnnnnnnnnnnnnnnnnnnnnnnnnnnnnnnnnnnnnnnnnnnnnnnnnnnnnnnnnnnnnnnnnnnnnnnnnnnnnnnnnnnnnnnnnnnnnnnnnnnnnnnnnnnnnnnnnnnnnnnnnnnnnnnnnnnnnnnnnnnnnnnnnnnnnnnnnnnnnnnnnnnnnnnnnnnnnnnnnnnnnnnnnnnnnnnnnnnnnnnnnnnnnnnnnnnnnnnnnnnnnnnnnnnnnnnnnnnnnnnnnnnnnnnnnnnnnnnnnnnnnnnnnnnnnnnnnnnnnnnnnnnnnnnnnnnnnnnnnnnnnnnnnnnnnnnnnnnnnnnnnnnnnnnnnnnnnnnnnnnnnnnnnnnnnnnnnnnnnnnnnnnnnnnnnnnnnnnnnnnnnnnnnnnnnnnnnnnnnnnnnnnnnnnnnnnnnnnnnnnnnnnnnnnnnnnnnnnnnnnnnnnnnnnnnnnnnnnnnnnnnnnnnnnnnnnnnnnnnnnnnnnnnnnnnnnnnnnnnnnnnnnnnnnnnnnnnnnnnnnnnnnnnnnnnnnnnnnnnnnnnnnnnnnnnnnnnnnnnnnnnnnnnnnnnnnnnnnnnnnnnnnnnnnnnnnnnnnnnnnnnnnnnnnnnnnnnnnnnnnnnnnnnnnnnnnnnnnnnnnnnnnnnnnnnnnnnnnnnnnnnnnnnnnnnnnnnnnnnnnnnnnnnnnnnnnnnnnnnnnnnnnnnnnnnnnnnnnnnnnnnnnnnnnnnnnnnnnnnnnnnnnnnnnnnnnnnnnnnnnnnnnnnnnnnnnnnnnnnnnnnnnnnnnnnnnnnnnnnnnnnnnnnnnnnnnnnnnnnnnnnnnnnnnnnnnnnnnnnnnnnnnnnnnnnnnnnnnnnnnnnnnnnnnnnnnnnnnnnnnnnnnnnnnnnnnnnnnnnnnnnnnnnnnnnnnnnnnnnnnnnnnnnnnnnnnnnnnnnnnnnnnnnnnnnnnnnnnnnnnnnnnnnnnnnnnnnnnnnnnnnnnnnnnnnnnnnnnnnnnnnnnnnnnnnnnnnnnnnnnnnnnnnnnnnnnnnnnnnnnnnnnnnnnnnnnnnnnnnnnnnnnnnnnnnnnnnnnnnnnnnnnnnnnnnnnnnnnnnnnnnnnnnnnnnnnnnnnnnnnnnnnnnnnnnnnnnnnnnnnnnnnnnnnnnnnnnnnnnnnnnnnnnnnnnnnnnnnnnnnnnnnnnnnnnnnnnnnnnnnnnnnnnnnnnnnnnnnnnnnnnnnnnnnnnnnnnnnnnnnnnnnnnnnnnnnnnnnnnnnnnnnnnnnnnnnnnnnnnnnnnnnnnnnnnnnnnnnnnnnnnnnnnnnnnnnnnnnnnnnnnnnnnnnnnnnnnnnnnnnnnnnnnnnnnnnnnnnnnnnnnnnnnnnnnnnnnnnnnnnnnnnnnnnnnnnnnnnnnnnnnnnnnnnnnnnnnnnnnnnnnnnnnnnnnnnnnnnnnnnnnnnnnnnnnnnnnnnnnnnnnnnnnnnnnnnnnnnnnnnnnnnnnnnnnnnnnnnnnnnnnnnnnnnnnnnnnnnnnnnnnnnnnnnnnnnnnnnnnnnnnnnnnnnnnnnnnnnnnnnnnnnnnnnnnnnnnnnnnnnnnnnnnnnnnnnnnnnnnnnnnnnnnnnnnnnnnnnnnnnnnnnnnnnnnnnnnnnnnnnnnnnnnnnnnnnnnnnnnnnnnnnnnnnnnnnnnnnnnnnnnnnnnnnnnnnnnnnnnnnnnnnnnnnnnnnnnnnnnnnnnnnnnnnnnnnnnnnnnnnnnnnnnnnnnnnnnnnnnnnnnnnnnnnnnnnnnnnnnnnnnnnnnnnnnnnnnnnnnnnnnnnnnnnnnnnnnnnnnnnnnnnnnnnnnnnnnnnnnnnnnnnnnnnnnnnnnnnnnnnnnnnnnnnnnnnnnnnnnnnnnnnnnnnnnnnnnnnnnnnnnnnnnnnnnnnnnnnnnnnnnnnnnnnnnnnnnnnnnnnnnnnnnnnnnnnnnnnnnnnnnnnnnnnnnnnnnnnnnnnnnnnnnnnnnnnnnnnnnnnnnnnnnnnnnnnnnnnnnnnnnnnnnnnnnnnnnnnnnnnnnnnnnnnnnnnnnnnnnnnnnnnnnnnnnnnnnnnnnnnnnnnnnnnnnnnnnnnnnnnnnnnnnnnnnnnnnnnnnnnnnnnnnnnnnnnnnnnnnnnnnnnnnnnnnnnnnnnnnnnnnnnnnnnnnnnnnnnnnnnnnnnnnnnnnnnnnnnnnnnnnnnnnnnnnnnnnnnnnnnnnnnnnnnnnnnnnnnnnnnnnnnnnnnnnnnnnnnnnnnnnnnnnnnnnnnnnnnnnnnnnnnnnnnnnnnnnnnnnnnnnnnnnnnnnnnnnnnnnnnnnnnnnnnnnnnnnnnnnnnnnnnnnnnnnnnnnnnnnnnnnnnnnnnnnnnnnnnnnnnnnnnnnnnnnnnnnnnnnnnnnnnnnnnnnnnnnnnnnnnnnnnnnnnnnnnnnnnnnnnnnnnnnnnnnnnnnnnnnnnnnnnnnnnnnnnnnnnnnnnnnnnnnnnnnnnnnnnnnnnnnnnnnnnnnnnnnnnnnnnnnnnnnnnnnnnnnnnnnnnnnnnnnnnnnnnnnnnnnnnnnnnnnnnnnnnnnnnnnnnnnnnnnnnnnnnnnnnnnnnnnnnnnnnnnnnnnnnnnnnnnnnnnnnnnnnnnnnnnnnnnnnnnnnnnnnnnnnnnnnnnnnnnnnnnnnnnnnnnnnnnnnnnnnnnnnnnnnnnnnnnnnnnnnnnnnnnnnnnnnnnnnnnnnnnnnnnnnnnnnnnnnnnnnnnnnnnnnnnnnnnnnnnnnnnnnnnnnnnnnnnnnnnnnnnnnnnnnnnnnnnnnnnnnnnnnnnnnnnnnnnnnnnnnnnnnnnnnnnnnnnnnnnnnnnnnnnnnnnnnnnnnnnnnnnnnnnnnnnnnnnnnnnnnnnnnnnnnnnnnnnnnnnnnnnnnnnnnnnnnnnnnnnnnnnnnnnnnnnnnnnnnnnnnnnnnnnnnnnnnnnnnnnnnnnnnnnnnnnnnnnnnnnnnnnnnnnnnnnnnnnnnnnnnnnnnnnnnnnnnnnnnnnnnnnnnnnnnnnnnnnnnnnnnnnnnnnnnnnnnnnnnnnnnnnnnnnnnnnnnnnnnnnnnnnnnnnnnnnnnnnnnnnnnnnnnnnnnnnnnnnnnnnnnnnnnnnnnnnnnnnnnnnnnnnnnnnnnnnnnnnnnnnnnnnnnnnnnnnnnnnnnnnnnnnnnnnnnnnnnnnnnnnnnnnnnnnnnnnnnnnnnnnnnnnnnnnnnnnnnnnnnnnnnnnnnnnnnnnnnnnnnnnnnnnnnnnnnnnnnnnnnnnnnnnnnnnnnnnnnnnnnnnnnnnnnnnnnnnnnnnnnnnnnnnnnnnnnnnnnnnnnnnnnnnnnnnnnnnnnnnnnnnnnnnnnnnnnnnnnnnnnnnnnnnnnnnnnnnnnnnnnnnnnnnnnnnnnnnnnnnnnnnnnnnnnnnnnnnnnnnnnnnnnnnnnnnnnnnnnnnnnnnnnnnnnnnnnnnnnnnnnnnnnnnnnnnnnnnnnnnnnnnnnnnnnnnnnnnnnnnnnnnnnnnnnnnnnnnnnnnnnnnnnnnnnnnnnnnnnnnnnnnnnnnnnnnnnnnnnnnnnnnnnnnnnnnnnnnnnnnnnnnnnnnnnnnnnnnnnnnnnnnnnnnnnnnnnnnnnnnnnnnnnnnnnnnnnnnnnnnnnnnnnnnnnnnnnnnnnnnnnnnnnnnnnnnnnnnnnnnnnnnnnnnnnnnnnnnnnnnnnnnnnnnnnnnnnnnnnnnnnnnnnnnnnnnnnnnnnnnnnnnnnnnnnnnnnnnnnnnnnnnnnnnnnnnnnnnnnnnnnnnnnnnnnnnnnnnnnnnnnnnnnnnnnnnnnnnnnnnnnnnnnnnnnnnnnnnnnnnnnnnnnnnnnnnnnnnnnnnnnnnnnnnnnnnnnnnnnnnnnnnnnnnnnnnnnnnnnnnnnnnnnnnnnnnnnnnnnnnnnnnnnnnnnnnnnnnnnnnnnnnnnnnnnnnnnnnnnnnnnnnnnnnnnnnnnnnnnnnnnnnnnnnnnnnnnnnnnnnnnnnnnnnnnnnnnnnnnnnnnnnnnnnnnnnnnnnnnnnnnnnnnnnnnnnnnnnnnnnnnnnnnnnnnnnnnnnnnnnnnnnnnnnnnnnnnnnnnnnnnnnnnnnnnnnnnnnnnnnnnnnnnnnnnnnnnnnnnnnnnnnnnnnnnnnnnnnnnnnnnnnnnnnnnnnnnnnnnnnnnnnnnnnnnnnnnnnnnnnnnnnnnnnnnnnnnnnnnnnnnnnnnnnnnnnnnnnnnnnnnnnnnnnnnnnnnnnnnnnnnnnnnnnnnnnnnnnnnnnnnnnnnnnnnnnnnnnnnnnnnnnnnnnnnnnnnnnnnnnnnnnnnnnnnnnnnnnnnnnnnnnnnnnnnnnnnnnnnnnnnnnnnnnnnnnnnnnnnnnnnnnnnnnnnnnnnnnnnnnnnnnnnnnnnnnnnnnnnnnnnnnnnnnnnnnnnnnnnnnnnnnnnnnnnnnnnnnnnnnnnnnnnnnnnnnnnnnnnnnnnnnnnnnnnnnnnnnnnnnnnnnnnnnnnnnnnnnnnnnnnnnnnnnnnnnnnnnnnnnnnnnnnnnnnnnnnnnnnnnnnnnnnnnnnnnnnnnnnnnnnnnnnnnnnnnnnnnnnnnnnnnnnnnnnnnnnnnnnnnnnnnnnnnnnnnnnnnnnnnnnnnnnnnnnnnnnnnnnnnnnnnnnnnnnnnnnnnnnnnnnnnnnnnnnnnnnnnnnnnnnnnnnnnnnnnnnnnnnnnnnnnnnnnnnnnnnnnnnnnnnnnnnnnnnnnnnnnnnnnnnnnnnnnnnnnnnnnnnnnnnnnnnnnnnnnnnnnnnnnnnnnnnnnnnnnnnnnnnnnnnnnnnnnnnnnnnnnnnnnnnnnnnnnnnnnnnnnnnnnnnnnnnnnnnnnnnnnnnnnnnnnnnnnnnnnnnnnnnnnnnnnnnnnnnnnnnnnnnnnnnnnnnnnnnnnnnnnnnnnnnnnnnnnnnnnnnnnnnnnnnnnnnnnnnnnnnnnnnnnnnnnnnnnnnnnnnnnnnnnnnnnnnnnnnnnnnnnnnnnnnnnnnnnnnnnnnnnnnnnnnnnnnnnnnnnnnnnnnnnnnnnnnnnnnnnnnnnnnnnnnnnnnnnnnnnnnnnnnnnnnnnnnnnnnnnnnnnnnnnnnnnnnnnnnnnnnnnnnnnnnnnnnnnnnnnnnnnnnnnnnnnnnnnnnnnnnnnnnnnnnnnnnnnnnnnnnnnnnnnnnnnnnnnnnnnnnnnnnnnnnnnnnnnnnnnnnnnnnnnnnnnnnnnnnnnnnnnnnnnnnnnnnnnnnnnnnnnnnnnnnnnnnnnnnnnnnnnnnnnnnnnnnnnnnnnnnnnnnnnnnnnnnnnnnnnnnnnnnnnnnnnnnnnnnnnnnnnnnnnnnnnnnnnnnnnnnnnnnnnnnnnnnnnnnnnnnnnnnnnnnnnnnnnnnnnnnnnnnnnnnnnnnnnnnnnnnnnnnnnnnnnnnnnnnnnnnnnnnnnnnnnnnnnnnnnnnnnnnnnnnnnnnnnnnnnnnnnnnnnnnnnnnnnnnnnnnnnnnnnnnnnnnnnnnnnnnnnnnnnnnnnnnnnnnnnnnnnnnnnnnnnnnnnnnnnnnnnnnnnnnnnnnnnnnnnnnnnnnnnnnnnnnnnnnnnnnnnnnnnnnnnnnnnnnnnnnnnnnnnnnnnnnnnnnnnnnnnnnnnnnnnnnnnnnnnnnnnnnnnnnnnnnnnnnnnnnnnnnnnnnnnnnnnnnnnnnnnnnnnnnnnnnnnnnnnnnnnnnnnnnnnnnnnnnnnnnnnnnnnnnnnnnnnnnnnnnnnnnnnnnnnnnnnnnnnnnnnnnnnnnnnnnnnnnnnnnnnnnnnnnnnnnnnnnnnnnnnnnnnnnnnnnnnnnnnnnnnnnnnnnnnnnnnnnnnnnnnnnnnnnnnnnnnnnnnnnnnnnnnnnnnnnnnnnnnnnnnnnnnnnnnnnnnnnnnnnnnnnnnnnnnnnnnnnnnnnnnnnnnnnnnnnnnnnnnnnnnnnnnnnnnnnnnnnnnnnnnnnnnnnnnnnnnnnnnnnnnnnnnnnnnnnnnnnnnnnnnnnnnnnnnnnnnnnnnnnnnnnnnnnnnnnnnnnnnnnnnnnnnnnnnnnnnnnnnnnnnnnnnnnnnnnnnnnnnnnnnnnnnnnnnnnnnnnnnnnnnnnnnnnnnnnnnnnnnnnnnnnnnnnnnnnnnnnnnnnnnnnnnnnnnnnnnnnnnnnnnnnnnnnnnnnnnnnnnnnnnnnnnnnnnnnnnnnnnnnnnnnnnnnnnnnnnnnnnnnnnnnnnnnnnnnnnnnnnnnnnnnnnnnnnnnnnnnnnnnnnnnnnnnnnnnnnnnnnnnnnnnnnnnnnnnnnnnnnnnnnnnnnnnnnnnnnnnnnnnnnnnnnnnnnnnnnnnnnnnnnnnnnnnnnnnnnnnnnnnnnnnnnnnnnnnnnnnnnnnnnnnnnnnnnnnnnnnnnnnnnnnnnnnnnnnnnnnnnnnnnnnnnnnnnnnnnnnnnnnnnnnnnnnnnnnnnnnnnnnnnnnnnnnnnnnnnnnnnnnnnnnnnnnnnnnnnnnnnnnnnnnnnnnnnnnnnnnnnnnnnnnnnnnnnnnnnnnnnnnnnnnacaatgaaactgagaacggatatcctgtgagattcttggggacaccgctaacgccgactgaggaaccatcgaagtcaagaacggtgcctattgaagatgtttgccatgacacatgcgaagcgttgaaagcttgcgaatgagatcggcgtccgctgtaatcgatgagcgttgtcccgcccggtccttgaatagacgggacccacaagccagaaagacctctggagtgaggatgtcctacttgtctccaggttggcagggcggcttcaatcatcagctgaccgttttctcattgatgcacgccgagactgtgatactgttggaaccggcgttgtttttggcgtacagcttggcgtccttgatgccggcgggaaggacgaccgttgcaatggccgtgcctgctggcgccgcgtaggtgtccaggttcgccaggaaatccccgtcgctgtcgtcgttgggatactcgtccgatccgctgccgtccggatcgccgcacgtcgccaaaaggtagatgtccaccgtgtcaccgctggtcggcgtcccggcgttgtcggccttcagtgttaccgctcgggctatggccgtagccgaaagcccggcgaggtcggacgtctggttgccggccgccgacaccgatacggaatcggacgaactccattgaacttgcttttcggtattaccaaccgccatcgctgtttccttcctagatcgccaccatgttcgccatcacatcaagacagccgtccacgaccgctttgacctgttccgacgtcgggccttcgggtaaggtgtccaccatgtcgggatgactcatcaccaaggcgaaatagtcccgcgtcacctgttgccgatcgacaaagatggccttggccaacgcgaagcgtttttcgtggttgtccacccctgtcccttcgtacgcaatcgcccgggccgccgcgaccaaatggagcgcgaccaactcgaacgtcgtgcccttggggacaagggcgtcataacattgtttcgctgtcgccacagcgcaccgcctttcctagtcgagagagatgtcgaggtcgccgatcacgaagcggacggtatcgccgctggtgatcgttttcgagagcgtcagcgatccgtgggccagcatgttgccgccggtcaaggcatcgaacagggcgaagtgtgtcactgtgccccaatcgccggtggcggcggcgaactcgatggcggtggcgttgtcgagggacccgccgctggcggcgttccagtcggtgcctgtcgtcgctttccgcgcgtaggagccacccgacggctccgccaggccagcctcatcgtcaccggggtcagctgtagaaagacccacgtagatcgtcggcgggctgtaagcgcctttgccgaagaggtggtcgaggatctcgttttcccaatagtctgcaaagcttcccatcgcaggggtcctttcatcgtcaggcgtccttcaggtgttggccgagccgggaggaagggtcccgacccggcgcacctgtcacggcgtttttcgggtctatgtggtgatgttgctcagcaggtaaccgcagtcggcgctgatgaactcctcgtcggtctcgtgtcgggcgcgaatgacgttcccgcgcacgcggtcgtcgcgatagctctccatcacgcaattggacgggctgtcctcggtccagaggaacgtgcgacccaggcacggcgcttcgcccagcatgggcgaaccgtcggtcacgcagagcatggcatgctcgttgttccagatccccgtcagcgaggcgtcctggcccttcttggccgagttgtagagcccgtcaccgacgaccacctgatcgacaccgaaggccagggccagcaggtcggtcttgatgtcaccgcgtcgcacgctcgggttcgtgtacttgatgcggtcgacgatctcatcgcagaggccgagattcaggaaggtgctgtaggcgatcaccagcgtgttcggctcgatgcccacggcgtcgtggatggccaggcggccggccttgacgtcgtcgatcggggtggcgttctcgccgtcatcccattcgttggtgacagagtgggcggtgaagttggacgcgttgaagaccatatcggcgatgcgcttctcttgattgcgcaggacgatgcggcgggcgcgaatgccggccatcgtctcggcgttgaagtagctcttgtagagcttgacttccttgtcgtcgacgggctcctcgaagccgttctcgacggtggcataggtgtcccaatcccattcccaatcgctacgggcgtactcaccacgcgcagcgcgtcgggtctcgggaatcgagaacatcacttcggccgggatcacggggaactggccggtctgttcggcggcgcggaagatcggcaggacctgcaggccgataaaggcgttgcgccgatcgacggcctcctggacgacggtcgccaggcggggccgttgggctggacttgaaggacggggcatagtatctctcctatctgggtctctctgggtttcgggcgcaaaagaaaacggccgcaccgggggcttctggccccagtgcgaccgtttcttttgccttggcgtcgcttcgcaggtgcccctgctaggcgaaccctgtattcacttgtcgttgcggtcctacgaggccgcttgcagtccgacggtggcgagttggtcgagaatcgaatcgatcgctacgttgttggcgtcgatgccggccttcaacgccgcgagatccgcgacgatctgggcggcctgggcggcggtcatgtccgtcccggtgtccacaccggtcaggtccgtcgtcatcgacgcgcaggcggcggggtcggccacgtggggcagttgcgccaccggcgtctggctcagatccgcctcgggcaggatctcgatgacgtcggcgtcggccgtggcggcctcgacggtctcgccgaggcagagcgttccactggcggcgatttcgccgtcggcggcggcatacacagcggctgccgcactgatggcgccggccgcgacgatctcgaacgtcccgccggcattgaaaagtcggacggtgacatcttcgccggcgctggcggtgaactcggcgacgccgatgccgacatccgtagcgccggcggtcaccaccgtcgagccgctgagcttgacgcgggtatgggcggacacgccgccggtccccgttagaaaggtcttctttgagccttcgatcattggtctatcctttcgcagatagttctcgtgtcacttatgtcgagtgcaagccgccaacgtcgcgcggctactcttcggcgtcaccgtcgccggtcgggtcctcgtcgcctttggggtcggggtccacaagcggatcgggggccttggccttcttggccttcgccttgatcgagacctcgcggggcttcgccggcttggcgtcgcgcagatcccgcccgcactttcggcagttcttgcgcttgccgggtcgggccagaacgccgaattgaccacaggtgcaacgtactcgcattacagctctccttggttcgtctgggcgggtgctgctcgggtcgcctcagtcggttgcggttttagtgggcgtcacgctcggcctcgtagagcttgggatacagctcgacgcacttgtcgatcgcctggccctcggtggcgttgtgctcggccatgtaggccttgacggcggcgtcaaacgtcgccggcccttcggtggcctgggcgttcggggcctggcccggggtctgctcggcgaactcggtgaccgccggatcgacggccggggtcgcggtcgccggggcggcggactgcttcgaggcggcggccagttggctggccagacgctcgttgcgcagctggagcgcctgggtctcggtcttgccgtcggcgaagcaactgaccagcagctcggtgtcgtcgccgcaggcggtctgcagcgtcttgaaacgcgcccgctcggcttcggcgccgtcggcctggccggccttgaagacgtcggcatggacctcggcgaactcgctcttgagccgatcgacggtcagcgtctccggcatcgggtgggtggtctcgttgggcataatgtgctcctttacggaaaactgaacggttttgtcgttgtcaccgtcgtcgaacgcggtggccgaggtgcggccatcggcgccgaagacgcacatactgacttccttgatggtcgatttgcggaacaccgccccgggacctttgagcgtcttgccgttgacctcggtcgtctcaccctccttgacgtattcgacgctgcgcggcgggcagtacagggacgcctgcatcgggaagccctcgcccacgtcgttgcggaactcctgggcgcggtcgttgctgaggaactggccctcgaaggtgaccttctcggcgatcgcctgtttcgtcgcgaagcccaggcgccgatcggtgaagtgcgaatcaaggaccggcgttttcttgccggcgaacttcatgccgcccaggtcgaacgccaggttgccccaccaccaatgatcggggatgatctcgccggaatagccgacgatactgaaccggttgcccttgtctttgtcaccgtcgtcggcgaaggtgacggcgccctcgcgggcgaacgtacaggcctggcggggggcggcgttctcgttacttgctttgcgtcgcggcatcgtcggtctcctgtttgtcgtcggtctcgccggcctcggtttcggcctcgcgttcccgctgtcgctcttcgataaggtcgcgatagtccaggcccttgcgggcggtgatctgcgtgcgtgatgttgtcttgttctctagctcgatcttgtcggcctgggcctcgcggtaggggtccacgtacggccacttctggcagacgacctcgtgcgcgaacgcgtctttgcgatcgaggagctgattggcggcgatcttcctggccagccaccagcgatacatccggctgacggtcgggatcaccacgtgcacctgctcgcgggcaaaatgtttctgggcggccttgtaggcgatgcgggcgttcatgtaggtggcgcccgagaagtcgagcgtcaccagcatcagcgggaagcagatcgcccggccgatctcgatccgctggtctcgcacgaacggggcatacgccgccggcgggcgggacggggtcaccgcgttgatactctcgccggggcccagatgctcgatcatgcccggctcgatcttctgcatcttcgtgccgtcttcggtctcgcccgtgctgctggtgccctgggtgtaggcgctcggaatcccgaggccgtcctcgcgggtgatgaagatcgacatacacgcgttgacgtgtgcggcgaccagttcggcctcctggtagcgcttgagcatatcgatattttcgaccgctggcgtcagcgccggttcccctcgcgtggtgctgaatcggtcggggttgaagacgtgaatcacgtgctcggcttggtaatgctgccagtcctcggtctcgatgtagccccaggtgttgggtttgccgatgtaataaccgagcacgcggccggtcgccctctcggtcgccacgccgttggtgacggtgaacgtcttgccgaggtcgctgccgtagggcgtgccgcaccgctggccttcgcagacctgcaggccgatgtcggtcagaatcacaaagatgtcaccgtcccggcgataactcaaaaagagcttatagagcagctgctggaaattgaaccggccggtcagctcgcacggttgatcgagcatttcctctcgccagagggcttcggcctgtttgttccaggccttgctcttggtgcgggcctcgatgtgcgtctgggtgccgacgacctcgtcggcctccgagagcaacaggcccttgaccatcggattattgcgggcctggtcccggcagatctcgcgcatcatgcccagggccgactcggtcagatgcgcatccccggggccgcccagcccgctgcgctgggtgtggaggcgcgtgttcttgatggcgttataaccgaaccgggcagcggcgtcggccagcttggcccgggccaagtcctggcggcgcgaggcaaaccaccggggcgagacggccttggccaggccgtcgatcttcgagctgactcgatcgctaagcgtcatacgtgcgccacccttgtgcctttgtcgttacccttggcgatcttgcgcagtagccgctcctcgcggcggtacagcacacccagatcgtgcttggtgaacgactggttgcccacggtgtaggccgagacggtcccgcgctcgatggcggcgatcgccgtctggacccggtcgagttgtattgcatacgattctgccatattcgcagaatacagtggccgggcaggaggtgcacagagggccgttactacagattagtaacgactcgaaaagtttctaaagcccctaggatttcgggatttctcgatttgcagttcaatttccggcgtgtttctgccgataaacgtgatggaggcgggtcgaagaggcgtagtgcgaatgcccattgcaagtagtctggatcttggcgagcgactgttacggtgactagccggtaggggtgtttccctgaaattaccgagagtaacggactactcacggggacggagtgcgcccaccggcaagaagcagcgggcattcaggaacacaaaaggcgaggtgacaatgaattacaacctattggacgaaaagtggattccggtcctttatcgcaacgggaaatgggatcgcgttgggattcgtcaggcgttcaaggatgcgggctgcattcggcaaatcgcggcgagcaaccccatggatcgtgttgcgatcgtacgatttctgcttgcgctattgtattggtgtaaggggagtccaccagatgatgcgaacgcagaccttagtgattctcttccctctgactggttctcgaaactgcatgacaacagagataacttcaatctcttcggtgaagggaagaggttctaccaatgcgcttcctcgggaaatgtgaactcccctgcaagactcgcggcggactatcttatccatgagatccccacaggtacgaacaaatggcactttcgccatgcgaccgacaaggtcgatggcttgtgtccggggtgttgtgccatgggtctgttgaggctgccgctcttttcaacatctggaggccgtggcaagccgcctggggttaactcgaaaccgccggtttatgccgtaccggtgggtgtttcactcgcggagactctatggttctcgtggcagcaagcatcgagattgggaacaccagcgtgggaagagccggatttgcagctcccgacaataggtgaggttcctctgctcatgggattgacgtggttgccgcgacgggtgtggctgggcaatgccgaggagcccgaagccgcctgtatctcatgtggacgcaaggagcgactggttcgactcagcgtgtttgctggcatagggagcactaagacaactgaaggtcgtcccaggcgaatctggcgtgacccacacgttctctatgttgcttctccgaaaggcgaagtgatatcgcaccatgcaagtgatgcccttggtgccgccgatgcggcagccgatcaatgggcaaaaaccatgaccagaatgctccaatctagcgcgatcggcagtgaaagtgttcgtgtctgggtagtcggcttctccacagttcagaacgacaagtatctggaggctgcagagtacgaggtgtcgttccagtgttcaccaagtcgtgttcgggagagtattgagagaatggaacaatggcaaaaacaggggtatgggctaaagaggcggatagccaggtcgaaggtcgagggttcagccttcgtttcagtcattcgcccccatgtggaaaagagagtttccacaaaagccggtgatctaattgccgggggggatgaggtgtggcaacaggcggcggcggaataccacccgcttatgaagttgatcgccacgtcgctatctcccggtttcacgacggcagcggttcaacggcgactacacattaccagggtggctccggatatgcggcccaaaacaaaaacaatcaagaaggcgggccggaagaagggaggagccaagtgagcgcagcagagcagtacattgatactttgacaaagctcaaggtggggcaacttggattgctgcgcacccatgcgggacaggggctcgatgaatcagttgatggattcgacctctttgctggattgtggtggccgttgcgacgacagaagggcgggcctccacctcgccgtgaagtggcttggctggttgccaagctttacgccttttgtccgattccacattcacccggcagcacgattgctcgccaattgtgtcactgccagccagccaagagccccgaaagggaacgattccagcagaaattcgaccgtatggtcaccctgtcgcttgagcaactcgaaccggctcttcaatgggctctcaaccaagtcgcctcaaacagggaggggcttgattgggtgcagctcacggacgatctttcaaactggcaccgcgaaggcaaacgcctgtcgtgggcgagacaattcattccggacacggaaagggacccctcatgttgatccagatacatgctattcagaaccacagccccgccaatctcaatcgagatgacttgggagcacccaagacatgctatttcggcggcgttctgcgatcgcgtatctctagtcagtgcatcaaacgaagcatccgaactagtgaagcatttaagtctctgtgtggcgggattcgtacgcgacaattggcacggctcattgctgagaacatcaaaggcggagccagtgcgcagaagcgagcagccaagattctcaagaaatgtggcatcaatgccaaggatgacgaaaagagcgatatgcttgtttacacaacgggggaggcgattcagaggatggccgtatgcttgcaggacggtgacaagaagaccgatgacgaattggcagcagtgtttggaacgctcatcagtgaacaggtagccgtgccggacatggcgcttagcggcagaatgctcgaaaccggtgttctgaaagataccacggtcgacgcagcgttgcaggtggcccacgccatctcgacgcatgaggcccggcctgaagtggattactatgttgcgacggatgacattcccggggccgatgccggcgcgggttacgtggatgaagccatgtttgcctctgcctgtttctataagtactcttcgattcactgggagacactcgtcgacaatctcgatggcttcgacggcaatacggagtatctagcagcccatacggttggcgcattcatccgtggagcggcgaggaccaacccgacgggcaagcagaacagtttcgctgctcataacgctcccgatgggatgttgatagaaatcgggaacactcccatcagctacgccaacgcgttcgccaagccagcagtccaaggcgagcgtgacatgatcgcccagagcatcgcccagctcggtcaatatgttcgcgacctggacatgggatatggccctccgaagaaacgcttctggttttcgcccaatctccgctatcgcttgaccacgcaagttacagaagaggagaacggcaagaagaaacggagtgaggtctcgttgacgaatgatgagtactcattcaagtctctcaacgaactgatcgccgccgtgattaggagccttggtcatgattgggatgccgtccagacggttgtcgtgaatccagaggtagcctcatgagtacgaatactctcttcctgcgccttgaagggccgttacaagcgtggggcaatcaggagtcgaagttcgtcatccgacggacggccgaggctccgaccaaatctggactgatcgggatgctctgcgcggcattgggtgtttcccgtcccgatgccgccggcgagtggcttccaagactcggtggcctgcgcatgggggtacgcatcgacgcgccgggtctccgctggtgggactatcacaccgtcggtgccaagatgcagatgcgtacagccgaaggtaagcacaaagatggcccgattctcacccggcgtgagtacctgtgcgatgcttcatttctcgctgcacttcagggtgaaccgtcgctggttgtcgaactggcgcaagcgatgaagaacccgaaatggaccctctatctagggcgcaagtcctgtccgccgtcccgtctgttgatggagcatccgccgggccttttccccgatttgctttctgcgttgatatcgattccttggcggcgacggctcaaggctgacgagccacggcgtactgcggattgcctcctcgactggcaaccgtcggacgaacagcccgaagcgcccgacgatgcgcttatctggtacgatgtgccgttgacgtttgagccaccagcgcatcacccacgctttgttattcggcacaaactgcgcgtgggtccgggaggtgaggtctccatcgcaaaacaaggcacgcaaagccccactccaggaccgcttcgcccgcgcgctgactatggcaacaccaaatacaggaagatccgacaagagcggcttgaccgcgatcatcagttatgtgttttttgtaagtcgcctgcaaccacggttcagcatgtcacgtatcgccatgctggtggagaggaacgtattgaagagttgcggtccctttgccgcctttgccatgatgccgtgacgatgatcgaatacggcttgggcatgggcctggatcggatcaacccagaagagcagcgatggcgggatcggatcatccagaaacgagaggagatcatcaagtttcgctcgcttgaaacgcgtcggcgtaaactcagcgccgaggaggtcgaatgatgtacctgtcccaccttatgatcgatgttggaaacaatcctgatcgaccccggcctggacggcgatggttgcgaaatgcttaccgcgttcaccagcgactttgcatggcgtttccatcgaaggaacgcccaaagaaggaagccgacccggagtttctgatgccatattcacccgacgacttccctgaagcccggcacatcgcagaccagaaggcagcacaggttggttccgaagcactgcgtcatgtacacacaccgcgcgattccagcagcggtttcctgtttcgaatagaccccttgccagactcatcagtatcgattctggttctgtcggccgtcaaaccggattgggactatgcttttcataatgccgcttatctcttggcagcgcccccctccaagccgcgttccatggaactggccatcgcaacgggcagtcagtttcacttccgtctgacagccaatcccgtccggaaagttgcgaccattccaagaaggtgccgggaacggccggatcaaccgggtcgccacgggcgacgtgttccagtaccgtcggaagacttcggaaagtggctggtggcgcgcggtgagatacatggctttcggcttttcgaaccgcttgaggagactcttcgcactcagcccggatacgtttatgtcgccaagggccgcgacaccggtaaggggcagcggttacggagtgtgcgttacgatggtcttctcgaagttgtcgatgtggagcggtttcgcaaggcgttgctctcaggcatcgggagcgccaaggccttcggcttcggactgttatccatcgcgccggtgaatcgatgaccaagttgtgcggctacggcaaaggagagattgcactcatcgaataacgctctttggtgtccagtacgaagggattctggaagtgacggatacgcagaagttctttcggacgctctgctctggcattggcccggctaaaggactgggcatgggtctgctaagcattgcaccggcttaggagattcaatggctgacttgcatgaactgccgaagtttgaggatcgctggactcatctgtacttggagcatggcggtctggacaaggacaaagagggcctggtcttccggcaaggggaaggtcgcaccctgattccgatcgaccaactttcactggtcatgttgggacccggaacctctgtcactcagcaggccgccaaggcgctggccgcgaacaactgcctgatgtgcttcgtcggcgaacagggtgtgaagatgtatgcctttggaacgggagggacacacagcgcccgccgactgctgcgacaagcagaactgtatgcctctcctgaacagcgagagcgcgtcgcccggcggatgtatctgaaacggtttcctccaccaatcccggcagatgtgaccatacagcagctccggggcatggaaggagcccgagtgcgcaaaacgtacgagcagatggctcaagactggggagtgaagtgggaaggccgcaactacgatcaaaacagttggtacactgccgaccccttgaacagagcaatgtcttcggccaatgcctgcctttacagcttgtgtcacgccgccattctctctgccggttacagtcctgccatcggcttcattcatacaggcaaagtactgagcttcgtgtacgacgtggcggatctctacaaaacggagatctccgtcccgctggccttccaggtagccgctgactccagcgagcatgtggaaagaagggcgagactggcctgtcgggatgctttcaagcaaacgaaattgatacggcgtatcttgcccgatattgcggaggtgctcgatgctcgtgatgatcttggaaaaggtgccgacgagtctgaagggcgagctatctcgctggctgatcgagcccaaggctggggttttccttggaagtccgacggccagaatacgggataagctgtggcagaaggccgtcaagaaacgtaaacggggatacatcctgcaaatatggtctgattccagcccacaggggtacagtttccgttccgagggcgagtcttttcgccaaatggttgacttcgagggcattgcccttgtggcccgcgtgggcaagggctagttcgagtgagtcccaacatattgcggttaggcaattggtggcatacaatgccgtggtattgtccccacgcacgtgggggtgaaccggcaaaacgtttcatcgcgttgtctgcaatctcattgtccccacgcacgtgggggtgaaccgggcgtgaggtcggccggacgatacccttcaagtattgtccccacgcacgtgggggtgaaccgcgataaaacagaaaacccaccctatcgtatccattgtccccacgcacgtgggggtgaaccgatagggaacgaagagatggcattgacgcgacgattgtccccacgcacgtgggggtgaaccgtaaggttgatctgtgcaagcttgtccgtaacaattgtccccacgcacgtgggggtgaaccgctagaggctcacgacagaaagggccaccgaggattgtccccacgcacgtgggggtgaaccggagccgaggcgtcgatcgtcccccagacggtaattgtccccacgcacgtgggggtgaaccgccgaccgcctgcccgcctccgtcgcccgagccattgtccccacgcacgtgggggtgaaccggccacgtaaagcccttgtatatctatggttgcattgtccccacgcacgtgggggtgaaccgacgacgcactacgccatcactggggcgattaccattgtccccacgcacgtgggggtgaaccgatccaggggccaatacacacaatcctgattttattgtccccacgcacgtgggggtgaaccgcattcccttccaccgtaatcgcgggcgtcatcattgtccccacgcacgtgggggtgaaccgaacagtgtgcggaatgactacattgcgtgggtcattgtccccacgcacgtgggggtgaaccggacatcttccccgctggtatgacgggcgtgacgattgtccccacgcacgtgggggtgaaccgatggcgattgaattcggcataacccccgtgtcattgtccccacgcacgtgggggtgaaccgtaacgcccaagcaagtccaggtcgttctggatgattgtccccacgcacgtgggggtgaaccgtaccatgggcgcttttctcctttattcattgttattgtccccacgcacgtgggggtgaacccgcatccgacgaattggacagaaaagcaaacatattgtccccacgcacgtgggggtgaaccgccatcgcagacttgacccgcgaagaggtacggattgtccccacgcacgtgggggtgaaccgagagcaggggagcggggcgtgatggttcgtgaattgtccccacgcacgtgggggtgaaccaatcgtatatatcgccgcttctacgctcatgcgattgtccccacgcacgtgggggtgaaccgacaagatacaaacgtggaatggcttcacgtggattgtccccacgcacgtgggggtgaaccgtagtaggtgccgcgaaagatcaccgtgccgctcattgtccccacgcacgtgggggtgaaccgtgctgcatcgtggtacaagcactaagcctcgcattgtccccacgcacgtgggggtgaaccgcacagcgaaattcaggatattcgcagccttgacattgtccccacgcacgtgggggtgaaccgccggccgaccagaagggcgagaagatcgtgatcattgtccccacgcacgtgggggtgaaccgattgctaaattcagattttagcgcccatgatcattgtccccacgcacgtgggggtgaaccggtgggccgggggactaactgaaaggaccaaccattgtccccacgcacgtgggggtgaaccgacagagtcatcataacagccgacctggccagtatagtccccacgcacgtgggggtgaaccgggagacgggaaacttgatgaagaactctggtcattgtccccacgcacgtgggggtgaaccggcggctgccaggctagacatcctcggactcctggtttggcttgtagttgacctcgacgctcttgaacgtcctgccgcagtcttggcagcgatggtaacggacgggcacatggttgctgtcgtagaccgggcaatgcgtcgaaccacacgcgggacagcggacgcgcatgaagggcacgaagtctgggttagctcggcggcgtggttgccgaggccgctcacctggtgttccaagttccggtaagtcgtccaggaagcccgtcattgcgataacctcggcagcccctgcagaaagcccttgttctgttggtcgctacggtcgcttcgtttcgcgggcgctgccggcatcggcggcgcgacgagtgcctccaggaggccgacgccgaccagttcggccgccgccgtcgcgtagaccaggcagtcccagaggtggttgtcgccgccgccggcgcgcttgacccatcggatctctttccgttcgcccttgatgaccgcctcctgttcttcgctgcagagatggttcttgacttcctggctcgtctcgccgtgcaggtgcatgtagccggggccgggaacctcggcttcgaacagcaggcggaacaggcggttcttgatctcatcgacgttcagatcgtaccgagcgacgatcttatcgatcgggctcttccgatagatccgagccttgacccgatcgtcgccgcgcacggggatcgcacgcaagtgggcgttctggcgacagaagttgatcacgacgtcgtactcgtaaccgcaatcgacgcccgtcatcgcggtcggcagcagcagattgcgatcgtgcgaaaacggccagggccgcgcgatcaattgacggacccggccgaagttctctaattccttggtcgcgccggtctcgatgcgcccctcatcgagcagccacgcctcgaacagatagccccagccgacgaccgcgtaccagatgtgatcgagctgcacgtcgatcccgatcgtgatcgcctggacgcccggcgggatcagaccgcgctcgtagctgccgatgtgcggatcgagcttggattcctccggttccttctcgcggaaccgccaggcccgggccatctccgaacggctccagtgttgcagcggccgaaagttcccttccttcagcgacgtttgggcccggacgtacttggccgccagctggccgatcgactggaaacgcgggttgaccatgaacgccgagatccggtaactgcgccgcgcggtctcgggcaactcgcccaggatgtcaccaccgctgttgaccgtgcagccatgcggggcccaccgcccggcggtgatcgcctcgtgacggtcccgctcgctccagaccgccccgcactcggggcagacgtaccgtgcgcggtcgcctttctcgtagacctccggatcgaggaagcggccggtgaggctcttatcgaggaccatatgcctgtcgtcaaacgtatggtgttcgctgcagtgggggcactgggggtgaaactgccgcttgtcgccggcctcgtattcgcggtcggccaggtcgccctcatcgaccgggctggtggtcttaatcaaggtcgcgcgatggccgaaggtgcgcaaccgatcgcgcagcagattcaaagggtccgcctccttgccgacggccggcgggaatttaccgatctcatcggccaggatccgcgcgaccgggacgtcggccagttgcgctgcgctccgcgcccaggcgagatagaggttcatctggtccatcaccgttgcctcgccgatgtgcaggttctccagccgcccgccaatcgctttcaggaggaacgggttggcctcgaagatcggccgcacgcgggcggcgatacgacgcttgaccgtcgattcgtccggcatgacgatcatcgtatggacgggatcgacggcgatcgtataggccaggaccaggtaactgatcagcgtcttgcccgcctgggtgcaggcgtagatggtcacctcggagacggccgggtcgacgcaggcctcggcgatctcacgcaggaagggcgagaagtaaaacgagaacaggccgggcgccgtcgtctccttggccggcaggaacagattcgcctccgcccagtcgcagatcggcgccctcggcggcggcacccacaattcctgctcgcgcggcaggacctccagcgatgggccgagcagttcaaccatcgcgctcctcccgttcgcccagggccgctgcaggcggcgtttcgagccggcccaggaaggccttgaactcggcggccgtcgcctcatcgagacgcagttcggtcgggacctcagtcatctgctctcgcaggccttcgacaaaccgacgcaaccgctgctcgatcgcggcggcggccttgccttcgcagtcggcggccgtcgccggcagatggttctcgacgtaggccagcagattctgcacgcgggcgaccaggccgttctcgaccgcctggcgatcgagaacgtgggcctgggccttccggtagtcgagttccttcatcgctgcgttggcgacgcggaggcggtcctcgcgcttgccgctcttggcctgggccttggtcgcggcctcgaaccagcggacgaactcgctgaggttataggtgcagtcgggattgcggggcaggccggcgtcccgggtccaggcggccagggtctggcggaccttgccggtgatggcctccatcaccttgatcgggacatgctcgtaatcgaagccggtcgggctcttctcgctgcggaggaagttctcgacgtagcgcatggcgttgggcttgccggcgccggcctgctcgaccatcacggcgttgagcttcatgcgcagttgacggcggttttcattccacaggtcggcgacctcggtgtcggtatcgagcagttgccgcagctccggaccggtgacgcccatctccttggccgccgccgagacggtgacggtcgtcgcggccagttgcgagaccttgcgcagcagccgaccccgctcccaggcggcccggacgttgtcgcgtttggcgatcagggcaaccagatcaccgggcccgctgaacagcaccgccgcctcggtcaggttctcgcactccaggcccaggtgccgcacctcggccagcgagaccgtccggcggcgtttcccgtccgccggcggggtgcggggcttctttttcgtcttttttctggccatttcgtaccgcttcagttcctcaacctcggcgcgagacagcggctgattctgccggaccttgcccagcagatacgcgtgacgctgcttctgcgcgatctcaatcgccgatacctcgtgactcaatccttcctactttccccaccagtcgttacaatgcttcgctctttcatggcgacgcgcgcaagtcgtcggcagtggcagctgccggcggggcggttcgaccaccagtcaccgcccgcgtcgccgtctcttttctcgcaccgctttgcgcccggtccacgtctcccagcgcttgaccgccacgtcgacgaacagcggctgctgctcgatcgcgtagcagcggcgcccgagcttctcggccgcgacgatctgcgtgcctgaaccgctgaacggctcgtagcagatgtcaccgggccgggtgtggattcgcatcgggatcgcaaagcactccaccggcttgatcgtcggatggcccagggccggcgcgcgtttcttgccgtcccagcccagctcccagacgtcgctgtaatactccggcgtcgtcggatcgcccgctttctgataacccaccgaccagacggccgtcagcttgttggtgtccgatcgctgccggccgtcgatggcgggcttttgtttcttcacccagatcagcaggcacggctcgtgacgcagggcgtagtaacagaagctcaacacgcaaatcggtttgacccagatgatgttctgatggatgtgcagaccgagttcactacagacctgctcgatgtcggtgcggcgacgatcggcgtgccaaaggtacagggctgtcccttcctggatgacctcgaggccgcacctggtgaaatcccgcatgaaggtaagggcgtcggtgatctcacgctcacggaactgatccgaccaatccttgccgcctttgccgggccggttggtgccggtgtagtcgatgcagtagggtggatcggtggcaaagagcctggccgtctcgccggccatcagtcgtgtcacgtcctcgggtttggtgctgtcaccgcagagcaggcggtgctcgccgagtaaccagaggtccccatcttgcgtgatggccgtctccggcggcgcgggcatctcgtcgtcgggggcctggccctgcttttccgaaggtttttggatctcgctgtagagggcgtcgacaccgaggtcggccagggcggtccggtcgcccagttcgtcacggagctgctcgatatagccgtccagttcggcggtgaaccggccctggatgtgagggttgttcagcgtcaggttcagcagcttttcctcggcggccgaacaggagacggtgacacacaatacccgatcgacgccgcgcgcgccgagcacggccaggcgctgatggcctccgacgacgcgacgcttgccgccccggacgttcaccacgatcggctcgacacagccgaaccgctcgatggacgcggccaggccggccagggccgactcggaaatcacgcgggggttgtactcggcgctctgcagctcggccaattgaaacgtcgctaccttcggaacggcgatggtttttgatgacttcacggtgttgactctcctcaggccgggaccttgagacgctcgaaggcgccggcgtggcatttgggacattgttcgggcggcttcctcgctcgacaccgaggccggctcagccgtaaaagtgcctgtttggtccatctgtaacccctttatttgcagtgcgttatgtatgtaaaaccaaaaaaataaatcccaaagtagccgaacctcgcgatcccgcgaccgctcggcgtctattccggaggaggacccaccagatataaaccctgtctgcgcaatcgtttacacgcggcctgttgggcagtgatcttggtggcattaaaggcgacagtgtcactctgtttctctctcgatcggttcgatgcggtttaacatcgctcacagattcccgctcccggccttggccagcaggctgtcccagatccggcagaacatcgcccccggcctcttgagccggggcttcttgctcgtgtggtgcttgcgagcctggcggcgggcctcgccccacagcgtcgcggcgatcggcggtggcagggcggcccgctcggccttcgtccagcaggcggcgaacgtgcccagctctcgggccttctgggtgcgcaggtaggccaggcccaggtcctcgtagatcgcagcggcgaactccttggcggcgtcgctgtatcgctgctcgaagccctcgggttctgctggcggcccggtcccatcgagcacctggccgatgcgtgccagttcgccggcgattagcgaccccggggggcctttggcctgcgtcggcctgtcggccccccgagcgtcgacttcggtcgcccctggtggtgggtgtgcggctgctctgtccccttgagcgtcggcttcggtcggcacagtcggcgtcggcgtcggcgataacggcggggtggtggtcggggatgtggtggttcctgcttggcttgggggttgcccttggtccttgccggtcacttggtcttgccctgggctttcggctggtcccttcggcgtttcggttcggcttgccttgggtttcggattgggcttgggattctgtttgccgtttacttctttctttttctttccattgcccttgccgttgccgttcccttcccttttcaaagggctccggatttctccggatttttccgcagaccccgccgtgcccggcttctcgttgaccgagaggtcaaagtcgggcatttcgacgcgttcgatcagaccgaccgcttccagccgtttgaggaccttgcgggcctcgggcgtcttgacgttcagcacgtcgcagatatcggcgatccccgccggcgcccgcttgccgttgagcaggtagccccggtaggcgcggctccgatcggccgcctcattgcgcagggcgatgaacgccccatgcaaggccaggtggttgtcgtagcgcttcagcgcccgcagctgcaggcagtagtccttggcgctgtcgtcgttgttgctgaccgcctcgcgacagaacagcagcgggcccttgcgacaggcccgcgcatcttcgctcagctcgaagcggtcctcaaactcgtatatgtgccataccttcgggcgtttcccactcggcattcaagccctccgtggctagcggttctctctgatgcgcccggcctaagcggccttgccttcgccggcggcggccctctcggtctcggagacgacggcctcgtcgcaccaggcctgcagatccagcttgagcatctcggcgatcagctgtattaccgcccggtcctcttcgctgccactgggcggggcgcagtcgagcccctcggtcgcctggccccagagccgcttcagcacgacgtcgaggacgttcgacgggccttgcttgcgggccttctcgatcgcttggcgatagtccgccatcccgtcgtatccgaactgggcatcggtcgcgtagaacgtcgccaccagcgggacgatcgtcagcttgttatccggcagatccgcatacgccagatccatcaggtgctgcgcgaaccgattggccacgaagtcccaccgcgcccgctcggcggaggccttctgctcggcggccgagggcttgcgtgccttctggctggccagtgtcggcgtcttcttgaccttgacgtagcggaccttgcccttgtcccgcccggcgacgatcagcgcgggcgtcgcccctttgtccttcttcttgcagatcgtcacgtcgcccttgctcagaaccttgccataacagcgtttcagcttcgtggcgttctcattgacgaaactcgcgttgctgagaaggaccaggccgtcgtatttctgccgcatcgccgcgacctggcgtttcgccgccgaggcctcgcgcttggcccaacacttcgggtccagacaccgatcgcccggcttgatcgtggtcgtcaccgttacgcctccatcggccgatttcattgtttgcggtgcgtcccacagcagcggctggcagctggtccgcttggtgcacgtgacgcacttgctctcgctactcgtatcgaacggcgctttgcccagcagcttctgctcgtcggcggtctgtttttccagctcctcgacggtccagtcggcgcagtgactccagggccagttccccttcttgagcttgccgtgccaggcctcttgcacattggccgggaaccgcgcgatcgccgccaggtggccggccccccagccggtcaatccgccgggcgccatctcgccgcgccagcagtcggccagctgttcgtgaacggccgcccgcagcgccacccagcgcggggtctgtcccatcagtacgccggccgccttggcattcccttggcacttggccagagccgtggccgccgcctggccctgttccagcggcgtcaagtcctcgcggttggcgttttcgatgaaggcgatacggaacgccgcctcgtcatccatcgccccgtaatcgatcaccgggacctcggggcacttggccgccagggcggcgcgatgtcgccgatggccggccaggatctcgaacttgtccttgcggctcgggtgggtccgcacctgcagcggctgttggacgccgagcttgcgaaccgactcgataagtgcgatgaacgcgggatctttctcgttgatcgttctcgggttgtccgggttcggtaccagccgcttcggcggcaattgttccagcttcataactgtcctttcaagtttcatcgtccgtgacttacaattcgtgaaaagggcaggcacggaggccagcccctactaatccccgccaccgtggcaatcgacgccgtcggggtccttgtgtttgcgcagcacgttgcggccgttgagcttgcgataggcgacctcgcgcccgcactcgttgcagatcaccttgcccagccaggtggtcgtgtccttgcccgcctcggccgccggcttcggcttgaccttgcgcgcggccgttcggtcgatcacggcgttgcgatcgaccacgatctcgccgtcttcccattcggccttgtagcgcgtcaccatcgacggcagtaggctgaaatggcgcagcgccccggcgccgctgattcggaacgcctggcccggccgcgtcttcgaggcccaggccagcgccccgacctcctggcgcgacgtcggccgtaggattatcgcgttggcctccttacagaatccgacccgacagccgtcggtctcttttagattgatcccctcggccagttcgacactgacactgatcgtgccgctaggcgtcagcgtgacaaaccgccccttcgccacccggttggtgtcgccggtgtaaaactcggtctctcgcttgtccttcttcgccatgattatccttcctgtttgcacggttgcacctggcggcgtcgccattcgtcgagccagacgaggtcttctgctgaattgttcgggcactgttccggctcgaccgccaggcactggcccggctcgcccggctcccaaagatcgcacggccgctggcagtactcgcagagcgccgggtcactcatcgtcccgcccccatgcgcttgcgcaccttgttcggcacccagacccgcaccggttcgccccgacgccgtcgccgccgtttgcgtttcggcttcgtcgcggtcgcgcggccgtcggtcttgcgcaaggcccgcccgcgcgtcaataagtcactcagtcgcatcggtccctcctttcgggtccaatttgtcgagcactttcaacacgcgcaggcgggccccagcctgactaaggcccggcccgtcgagatcctcgcagatgattcccttcctcatcggctcacctcacggatgtcggtgttcgtgtagggaataggcccgtcggccaggtattgggccaggtcgaccttgacggtgtaggtcttgccgaacttctcgcagagcacgacggccttgaccgcgtaggcctgccagtcgatggccgcttcgcgctctttgtcgtgattgagcttaccgagcatgaaatggtcgacgtggtcggccgcccgtatgatcagctccagcgattgggtcgggtcaatgaccggctccatcgatgcccaggtgaagatcccggccgccttggcatgcgccagggccttaatgcgactgtgaggtgacgcggcgtgcggttcgtgttctcggcacaggtcgtcatcggagaacgtcagcgaggccccgaaggcgtcacgcgggccgtagaggtggaagtcacgcgtcgcgcggagcccgcccttggtcaggatcgtaaacggcacatcgttgtcgcgcaggatcgtgatggccttcttcgtgacgcgctgctcgaaggcggggccctgatacggatcgcaggtaaagcacaacagcacgcgcttgttcgtctcggccaaggccggggcttgtcgcttcagccccgcgatcacgccgtcccgcggtccgcatttggcgatgaagacttcgcgactcttgtgcaacgtcgccggcccgtagcagtagtcacagccatgccggcagcccttaaacaggttggcggccaggtggctgtattcccccgcccggcccttcggttcgtagatcacttgcattgactcgctcccttccaattccaatgagggcgggcacgggggcaccgcccctacacgtttacacccttcgcactcttgtgacgctgaatccggccgtcagcaggcccagcggccagagccagccgaggatcgggtgatggttcgccggcggtttgccgtcgatgcagacggtgtaatagcccgtcttggcctcggcgtacggtgggtcatcggtgatactgacgtagatgtactgcggacccggcaggacctcaccggccagcgtccaggtcccggtgttcgggtcggatgtcaccgaccagcccggcgtgcggctggccacggtgtaccggtggccgtcgggatcgcaggccgggccctggcgaaacagcttgcccgtcggcacggtgtaggcgacagcaccgctgagcgtgtcgatcaccgccggcaggacgagcccctcgatcagattcggatcggcccagggcggcctctcgtagtggatctgctcgcaaggcggcgcgttcggctcgtcggccacaactaccagcgtcgtggcctggccgatcgagcagagggccagcagcaataaaccggttcttcgcttcatgtccgctcctttcgttgctcgtcgaacttgtccgccttgcgcgccagatagcccataatgcccgccgccccgaagcaccagcagaacgactcgatccacgaaggggagataacggcgaatccgtacaagcccagtgagacaatgcccaagaacagattcatggttgcccctttcgccagcggtagccggccgcccaggcccgatcgaaatagccctggacctcgtcgtagatatcccggccgccgaggtgctcgggctggaggtattggtcgtagagcccgagccggccggtgacgtggaacggagtcaccggccaaaggcccttgaagcaccaggcaacggcgtcgtcgtagatctcgcagcgggccgcttgctcgtcggcccgggtcatcagacggcatcgggccagcagcgtcaccgccagggccttacccaacggcagcggcgtggtctcggccctctcgaagcgcgggtcgggcttctgcgatgagacgatcaggatcggcccgcgccagtcggtcgccttggtccgcgtctcgatcgtcttgttaccgtcggcgatccaggaggcccacggttgtttgacagacagtgccggcaggatcatggttcgtacctccgcaggtgcagcgtcgttagcgttcggcaggtccaggcccgccaggtgtccaggtccatccagacgtcacagtcctcggcgagtgcatcatggtcgacgtcggccagggccttctgctcgacggccaggtaaaccggctcagcgccccagaacttcatgtaaccgatcacctcgccggcgcggccgccgctcgattcgacaatctcgtagacgtcactctgcatggctcagccgttcttgagggtcttgacgttgttggcggtggttgtgccctggcggtccttcagcaccgcgatcgcggcggcctcgtcggtgatctggggcgagtcgagcagcgagtcgaccgaatggatcacgttgaccaggtccttgcccagcgctgtggcggcctgcgactttttccaggccaggtaggcgccgccggcggcggtgatcaggctgccggccaggccgacatagacgccgtagggcgccgggacgtgcgatccgaccgtggtgatccccttgccgagcagctcgatctcgtcgccgatcccctcgaccgggccggcgttggccagcacccgctcccagtcggtcagcacgtcatcgacctttcccttgactccccgggccacggtcagcttttcctgggccaccacgacggcggccgcaatcttctcgatttcctcggcgggcagattcgggtcggccagggccgcctggctcttggtcaggaacgcttcgagctggtcgacgaccatttcgacctgctcgcttttctgctgggccacggcgacggcctgctcggtcgccgcgatccgctcggggctgtccatattgcagccgccgatcgggatcagccaggtcaacgcggcgatgatgcagagtgtcttgattcgcatgtgcttcctttcgctaaaatgtgggttcaaacggttcgggccagtgccgacagaggtgacatccctcggggcactggccgctctcggtcttcagggggcagggcggcgtttcggggtgggccatttcagacgacccccagactcgctcgccgctcaacggctccttttgggtggtgatgtgcatggtacccttccttctgctcttgcctggccgccttcagttgccggttgaagcgttcgatgcgggcgatcgtctctggcgtcggcggcacccagcattcgtagagcgtgacctggctaaagtaacgcgacgccgcccggcgccgcaggcccgcgatcgccgcttcataggccgccccgatcttcgtgcggatcggccagaaatagggccgcagctcggcgtgctgggtgaccgcgaccagctcaaaacgccagacgccgcgattgcgccagccctggccgtcgacgcgagccgcctgatcaaagaacaaccccggaaatggcccctcttcgtcatacgcctcaatgatccgcaccgccatcgggcagctcctcgaacaggtcggcgtgctcggtctcgacgcgcagctcgacgatggcgtgcttctcgcgaaccaagaactccagctcggccaggcgatcgtcgggcaccacgacgtcttggaatgtcaacgtgcaatccttgaccacgccgaacatggagatcggcttgatctcggagtgttccttgtcgggcaccagtagcagggcgacgggtctctcgcgggccttgctcttgagcaggaacgccgactcgctcggatcgatcgagagtttgacgacgccgctcttgacggtgcggtcctcgaccgaagccgggcaggtgaatttgagtttacgcgtcttggccatagccttcctttcctgggtagagtggatgaatcaatagcgggggccggactcgaaccggcgacctttcgggaatgaaccgaccgcgctaaccaactgcgccaccccgcgatcaagccgtgatatttgtatgccccccacggccaggggcctccgttggcgcttgggcaggcaaaagaggcgggccccggcaacgacccatggaaccggggcccaaccacaacaaaaggacagggggaagtgaacgggttcgggcgggcctttcacccgcccggcgggacagttgcagcggcaagctcccgctatgaccaggggccctcggtcgcgacgatccgccgttgtgtcgcaacgtcatggggccagtcgaaagtaattatcgagaagaacagagggcccggggggagaggtggttttgagagcccgccgactacctggtcgggccgctctgtcgaagaatgtcacgccgccgtgtcaagagtgtggcaaaaaactcttggtctcaggggtgaaagctgctagaatacggccttgagagcacgttaagaccgtttataacctggagtaccgagcttccaagctgattacgcgggttcgattcccgccacccgcttttttccccgcgctgtttgcaataggctccctatcgacccatttgccgggcgggttttcggtttttcctctgttcggcccatccagagcctatccttagtcatctccagaggtatgagcaaccacgcggcgcaaggccatgcacctgccgtccgtctgatctgcgcctggtatttgagcccactcgttcccaaaagggggcgagtttggacgtggaatctacagccagatttgacttctccgcccttggcacgcgtggaattgcagatatggctccggatgggtctgggagtgacactgtcttggctggtgacagagccggcaggaggtggtgacgagtgggtggaagtgggacccggtgacggactcgggaccagcggtctctcgatccccgccgccggggcgagactttccaagggggttcacgattccgtgttatagggcaaagcaggggtagcggtttcgtaaatgcctttaacggttgcagttaagttgctactccgtgacggtcctataaacaatcgccccaaaaaaacgacaaaatgcatttttggaggttgacgaagtgggtgtgagtggggataattcccaaacgctttgtgttgagtggggcaattgccatgcttttactaaccggtgaataccagcacgttgtagacggcaaaggaagagtgctcgtctccaacaagcttcgaagccagatcgacgtcgatgagcatggtcgtaacttctacctcgttctcggggccaacggtgtgttgtgcctgtaccccgagaagtactttgagcagatcgttctggccgtggcccctggggcgacggctccggatgaagcggtggcgttcgaacgcatcagcttcgccttggccagcaagatcgaattggacggtcagggccgcctgttgatcggcgagaagctgcgtaagcgggccgggctggcggacgacatcaccctggtcggtgtcagggaccacattgagttgtggaacaatgaagattgggaacgctatctgtcggatcatatgggtcagtaccagaaacagatgacgcaggcccggcagcttgttttgcagaagcaacagaaggaattataaacgctgcgttggaggcaatggacagggatggatagttgctattgtcaggttgtcgccgggactctggcaggggaacggccgatggacgagcatacgcacgcctcggtggcgattctgggcgagcgtttggagcgtctcaaagagcacggtgggctcttcgccggcatcgagttctcaccgcatgtccagcgattgcgacaacgctctgagccggtatcgataggctgaaagggcgtgcaaagttcaggagtgaatcgctcagaagttgaacacgttccggtactttcggaacctttggccgaacagataaacttaccccaggatggggtgatggtcgatgtgaccgtgggacacggaggtcacagttttctgttcggtcagaagctgggtccgcaaggcacgctgatcgggctggatatcgacagtttgtctctggagcgggccgagcaacggttggcgggccttggctgcaaggtggttctgattaaatccaatttttccgcggttgctgaacgtcttgacgaattgggcgttcctgcggtcgatttcatcctggcggatttggggctgtgctcggcgcaattggcggatgcggatctgggacttagttttcgcgatgaagatatgccgttggacatgagaattgacgaaagcttggagacgacagcggccgatatagtgaatgggtacgacgagaaggccctggcggatctgatctacgaatacggccaggatcgcgcctctcgacgtatcgcgcgttacatcgttcgacgacggcaacaagaaccaatcatcacgaccggccaactcgtgcaggtcgtgtgcagcgccttgtataagggcggctcgaagcggcgagccagaaaacacccggccacccggacgtttcaggcgctgcgaatagcggtgaaccgagagttggagaacctgaaaatgttactctcctcggctccggcgttgctcaaacagggcggcagcctggcgatcatcagctttcatagcctggaagacggtctggtcaagcgcgatttcaaggcacaccagcaggcgggcctctatcagatcctgacgaagaaaccgatggtggccgatcgggacgaggttgcggccaaccggcgggctcggagtgcgaaactgagaatggcccgcaaaactgagatcaatgaacaagaataggcatggcaggatgcttttacgaaggaacgggttaacggcaaggaacggagtgcgactatgacgtcagatgcgaaaatcggcttgctcttgggattggtgttcatctttgtcattgcctttatcatcaacgggctacccaactttggcaaccggtcgcaagccgaggcggcgccgatgacgaattttccggacgagaacctgggtgtggccgacagcgcccagagtgcccaggagcagctcgactgggagggtctgctggcgcaagggagcgaagagcaaaccgagtttcagccggtcgaagcggaagtcgaaccgagcgtggcgctaccggcgacgacggttgcgacggacaccgagaacggggccgttcgctccgttcatacgcttgactcgctgatgggaggggtctcccggaccatcgaagacgtgattaagggaattggtgaggcctcgcagtcggtcacgctgcaggccgaaacgagcgaaccggccccggcgatcgagatgcccgggcggcagccgatcgcccaaccggtccagacggcgcggtcccaaaggccgacgccggcggaaaagcccgcccgcaagcccggaaagaagtctgcatcgcgggtctacgtggttcaggatggcgacgttctggccacggtggccaagaaggcctatggtcctgaagagggcaacaagctggccaatatcaagcgcatttaccaggctaatagcatgatcttgaatagccccgacgagattgtggtggggcagaagctggtcattccgccgttgcccaagggtaaggtcggagccgccgatccggcggccgtgctggctgggccgcacttcgagaaggtcggcaccgcctccagaaaggccctggctgatgtgaaacagggcaagcctaaggggtggtactacgtcgttcaggatggtgacaacttgtggaaaatcgccgtgacgcaactgaacagcgggtcgcgcagcgaggagatcgccaagctcaacagcgatatcctcaagagcaaggacgctctgaccattgggatgcgcctgcgccttccggcgaaatagaatcaagccggcgagcccggcgtgtggagacaaggacttctcaacggcgacaacgacatggcttctcgattgtgcttcgcgtttgtcatcttcttctttgcagccatcctgattctggcggtctatctgcgcagcgccaaccaccgtgttttttacacgttgcggcgacaaacgattgagcagcatcagcttcagcaggagttgtggcagaagcagttgagggtcgaggtgttgaccagtccggccgccgtgctgcagcggttggatcaataagacggacgctggtgtggcaaccgcccacgtgcgctcgtgctcgatgaacgaatgtcaggacagatagcagcaagcgaaggatgccgtgtatggagacaagggacgtcatggggagcgaatcgacccgcggccgatcccctgatgattgttcgcggcgcgagcgaatcacgatcgtcgtattcgtctccgtgatcatcgcggctttcgcggccctgggtgggcgatgctactacctgcaatacgctgcggccgatcactatgagcaactgagtctgcgccagcaatgctcgtttcttcccctggagccccaacgcggggccatcctggatagtcgtggtcgcgttttggccgccagcaatcagattcgcacgatcttcgccgagccccgcgtcatcgccgagcccaaggagacggctaacgtattggcgccgattctcgatatgggggggcacgagatctgcaagctgatcaccgagagtcgcaatcccggctacgtggccctcaaggtcgatgccgaagttgagacgtgtgatctggcccgcgccgtgtacggcgtcggcgtgcagtctgcctggcgtcggcattacctgacggggcgtctggcctcccatgtcgtcggctttaccagccgggataatcgaggtctgggcggcgtcgagaaccgattcgacgcggagttgcgcggtgagggggcccggcatgcgttcaatgtggatgtccaacgccggcctctgtccttcgccgtggcccagaatacgggtgataacgccgtcccgaccaacggcagcgccatcatcttaactctggacgcagcgatccagcaattcgcgcgcgaagagttgctcaagcagtacaaggagtacgacgctgaaagcgctttggcggtcgtcgctgatccgcatacaggcgccattttggcgatggtctcgctgtccgatttcgatccggacaacgtcggacgcacgaatcccgatcacttcctcaaccacgtgctgaccgaccaattcgagcctggcagtatgattaagcccattgttgccgccatcgccctggacacaggggcggtgagcaagtacgaaacgatcttctgcgagaacggcaactaccggggtcatggcttcggccggatcggggagttcgacaagggtttcggcgatctgacgttgcgcgagattctcgtgaactccagcaatatcgggatggccaagatcggacagcgcatgggccccgagcggctctacgaaggattgacgctgttcggtttcggcaagaagatcggcttcgacctgcccggcgaggccgaagggctgctgcgtcatccatctgcctggacgggctacagcatcacccgaattcccttcggccaggagatctcggttactgctctgcaaatggtgcgagcctactgcatgctcgccaacgggggacgcctggtgcggccttacctggtcaaggttgtggttcagccggacggatcgatggtggatgtcaggcctccggcgctgcgtgtcggctacgtgatcaaacccgagatcgccaagtgggtggtcagcgaggcactggtctccgtcgtcaacgaaggcaccggccaccgggccaagttggagaaatggcaggtctttggcaagacgggcacggcccaactggcgcgcagcgacggacgcggctacgagcccaaggcctacgtggtttcgttcatctgcggcgccccggctgaagatccccgagtcgtcgttctcgtctcgattcgacgaccgaacacggcgatcaagggacgcttcaccggcggcggcagcgtcgcttcgcccgtcgcggcggcgattctcgaaaaggtcatgacctatctcgaaggtacggaccctgccaaggcgaccatcgcccgggccgcgccgtagagcggcagacgtgcttgctgggggcaatcgcctcgtcaggtatcgacttccggcgttgtcggcctcagccttttcctgcatcgccatagtgttctactgtgattttatggggcgtgcacagccgaagaacagatgggccccgacagggcgtcgagccacgttggggacctggggcacattgtgcatggacggaatatagacgtttggcacgaagaagggggcattatgccaacgatgctgcaagcggattgtcatctcgatatcgaccgtctgtgggagctgttcaaggagacgggcgaggcttgctatcggaatcttctggtggatcgttaccactatctggtcgaacgcactgccacgcatttgcatcaaaggctgccgggcgctgtggagcttgatgatctgatcagcgtcggcgtttttgggttgatgagcgcggtggagagcttcgatcgaaaccgggccgtccagttcaagacgtactgcgtgcatcggatcaggggcgctatcctggacgaactacggcagacagattgggtgccccgcaccgtccgcaggcgggctagcgaactatcgactgccgtgcagtctctccaactgcatctggggcgcagacccaccgaatgcgaaatcgccgacgaacttggcgtggacgagttcgaagtagagaagctgcggcgatacagtacggccccgcgcgtgacctcgtttgatgagatgtgcggtgagggtgaggatagcgagggcatgcggcggttgaatctcgtggcggccaagaaagcccatacgccctgtcggcgagcgcgccggcgcgagttgctggaccagttgacccacgggctgagccggaccgagaaactcattctcgtgctgtactattgcgaagacctgaccatgaaggaaatcggggtaacgctggggttatccgaatcacgcgtttcccagatgcactctctcctggtgactcgtctgcgggccaaggcctccagggggcagccggcattcagtgcgttacggcccgctctctgaccttgggtggggcactcccatcgctgtatatcatggccttttaggcgcctaagcggacccacgcccgcccgggtcatcattagaaactagctaaatcctgttttgcggacgcagttatggtacactattcggctgagtacaagatgtacggatgccggagcgtaacgccgcatggccagaataatctatgccgtcgcaggagagggatatgggcacagtagccgggcccatctggtcgggcagcgcctgcttgacgcgggccatgaggtgatgttcgtcgcctcccagaaggccttgcgctacctccgatcgatttacggcccagaggtcaaggagatcttcgggttgtcctttgcctatcgtcgcgggcggatcgaccccgtcgagacattcacgcggaaccttttccaggttgcgcgggccaagagtctcaacaagcggctcttcgagaaggtctatcgttcgttcaatcccgatctggttatcacggatttcgagccgttcaccggctggtgggcccggcggtctggcgtgccgttcatcagtctcgacaacgagcacatgctgaccgtgtgccgtctggagcaccgtttgcggtacgtcttgccacgcctgactgcgacggcggtgaccaagagtttcggcatcggggccggcacgtatgttgtgacgaatttcttcgacgcgccggtgaagaccgaccgagcgatcctggcgccacccattgtccggccgatcgtcaccacgatggagccttccgacgccgggcacgtcgtgatctactggaccacgggcacagaggaaacgcgcctgcggacggtactgcggaagttcccggggcagcggttcttcgtttatgggtttgacaagtccgcgaccgtggggaactgcgtcttcaagcgcccttcgaccgaggggtttcttgcagacttggcctcggcccacggggtggtggcctcggcggggctttcgttgctcagcgagtgtatgtactggcgcaagaaaatgctgcttctgcccttggccggccagtacgagcagattgtcaacgcgcattacttcgagaaactcggtttggggattaccgccaagcgtttgaatgaagcggttctggctcgcttcctggaccgactggacgaacccatttcgcaggacgaacgcattctctggcccgacaacgagaagttcttcgagacgctggagacggcgctgagtcgcctgcagacgccggtcagcattgccatacgagagattggcccgaaacgtcgttcgacggcgccgatggtgcgggcggaagactgacggatcggcgcccaaggtccgctctagggcaggaccgtcggttgcgacgccgtgcccacgtagcccttctcgatgcagaactggatgacatcgcgcgccagcggggccgcgtcgctggagccgtattcaccgccttcgacgatgacggccagcgcgatcttggccccttcgtgatcttcagcgaatcccgcgaaccaggcattgtaagggcgttcggtggacccggttttgccatagactttgacgccttgatccttcagggcacttggcccgaatactttgtttgccgagccgcctgattcgttcaccacggcgtccatcccatcgtaaacggtccggagggtctccacggagattcccaggtcggtgggtaaccccggcgcgggggattccggtttcaggaagagtcggggccggatcgctcgccctccacgggcgatggtggcgaaggagttggctacttgcaagggggttgcccagaggttgccttgcccgatgccgaagaggggaaggtctcgcttggccagcggaggaaggtcctcgagcgacttggtgctcttgggccgttccctgctgattagcccggcagcttgtcttagttgccgggggtccagatcgtttggccccggccatggacaggccagcggcaagcgacgtccgtagccaaagcggtacaaccaaccctgcaagactgccggttcgatatcgttggccagacgcgagaaatagacgttgcagctacctttgatggcgttgcgtgccttgttggtccacttctcgtcatggccgaagccgtgcttccgctggatcaagcagcgaggccaaccgcgcggaggcgcgtgggaggggcacgagataacggtgtcggccgtgacgacgccagcctccatcccggcaatcaggatgatcggtttgacggatgaacctgggggatagtcccgagccagggctcggttgagcagcggatgatggccgttctggaccagttcagcgtaatcggcgcgtacgcgattgttgtcataggtgggcagcgaaacgagggccaggatatcgccggtccggacttgcatgaccacgacggccatgttggcgtcggcgttcttgttcagggccgggttggtcaaatagttttcgatacgcgactgcagttcgatgtccagagtcaactggacgtcccgaccgaattcggtctccgtattgcggacgatctgaccgtcgatgtcgctgaccaactctccccggcggccgcgcagaatcggttcgcagacatactcgacgccaggtcggcgcccacagacttcgccttcgagatagctggccaggcggtcatgttcgaagagcgccttgtcgcggtcctgcgtggccccgccgacccagccgatggtctgggccgccacggagccatagggatactcacgttgccccttgggaacgacttccacatcgttgatgtccatgaactcgaactgggcggtgaagatgtcgtcctcggtcttcaactccagcagaggctggctctcgtatagatcgcgaatgtcatccacctgtccgatcagtttgtagcgttgattcggatcgggaaaatgccgttcgaagtcggagcgggccaccgacatgggaacgctggtgattcgcccgcgatactcggcgatgatgttggggtctggttcattaccgcgccaggcgaagaaggttcgcaagttccacatcttatcattcatgttcgtgatgcgatcttcgatctgggcctcggtgacgccgaactgggcgcaatcgtgtatgatgcggtcgaggtcggctcgccgcgcggtcgcctccttgaaaagatcatcgagggccgacgcgctgccgttctcctcagccaatagcttctgggcgaggatgacgcgccggtctctgaaacgactaagaccgtaatcgatggtgacctggaattcgggaatgtcggtagcgagcaccttgccgtttcgatcgaggatatctccacggagcgttttgagttgtttggatcgcccgcgctgcagcttcaatgcggccacttcgtcgcgcaacgaggagtcggccagcagttgcatttgcaccagcctgagcagtccgatccccaggagcaacagactggcagcaatgaatattctaactcgcttttcgtacatactgattcgcttggagaacgtcgacccgactgggtcgcgtctctgatgcttggccccatgtgtgtgatcgtccgtcccggcggcagcgctgtcgccttacagccgccacttgccacgccgacgtttcttcttatttatatgcatccaccaggccagcggcaagcacaaaaagggcccgagtagcgccgacaacaccggttgccagaagagttcgcgggccatattcagcggcgccgggtcggcgcgcagatgggccaggagatgggcgacaatggtagtcgtcagggccatgacgaagatcgcgattccctggtagggcagtcgtttgatcgagatgacattgttcaagtcggaaagcagcgtgccgaacaggccaaagctgatgatctgtggtcccatgaacccggtgaccgggttggccagatctgcggcaaagccgatggcaaaggacgtgattacggcgtcgctgggattgcattgaaccgcaaagaacaccagcaggatcagcagcaggtcgggcctgatgtcaggactacccagccagacgacgccgagaaagctggtttgcagaaccgttgcgatgacaatgagcacggcaaaccgccaccaacgcattcacctatacctcacgatggaaggattcgggattcgagcttcagcgccgtccattaccggccgggcacaatgacgtgcacgcccttcagatttgcgatgtcacagaccggttggaccgagatgttcaggaccacggggttttcgtccggcttgcagtccaccacgacagcggtgacaaagggaatctccggatagcccggggctttcagggcatagactcggtcgccttttcgggccttctgggccttgtgtctggagggtacctgcaccgcggcggtgttcgggccgttgcccgtcatgatcccctgggccttcatctgtgcgatgcgcaccggaattctggacgctggatcggtaatcagcctgactttggcggtttggttcaggacggcggagatcgtcccgatgacgctgaaatcgcccaggacaaattggcccacagccagacgatcgttttgcccgcgattgatcaatagttcactctggccctgcccgaggtcggataggacgctggcttcgactacgaccatgcgcttccaatcgggattgctgcgcacttgctgcaggtcggcgatctgttgctcggcggcgtccaaatgagcctcgcggttggcagcgatgttcgcgagttggcggttctctaccgccagttcctcgtagctttttgcacgtccggtctccgcccgagtggcggtccgcgccgccagggtcgcaacgcgcccggccgccagcggcccacggaacatccgggcatacgccaactggagcttacctgtcacggtggcgggggtgaagagaaagatcagcccgcccagcatgaagtagacgaacaagaatcgcttcgagattttgctgccctgtcttgtcattgccgtcggtaaaccgggtgtccgagggacgccaagcccatgaggctcgcggtggggttactcccaccctcggtcattgtggtccatggtatccttccatatctcgagattctcgaggtagacgctggtgcctcgggccacgcaactgagcgggtcctcgacggtgtggaccttcaggccggtggcgttggtcaggacgacgtccagcccgcggaggcaggacccgccgccgcagatgtggataccattgtcgatcaggtcggccgccaactccggttcggccttttccagcgtcgccgtcacggcgtcgatgatggccgtgatcgggtccttcaaggcctcgcgaatctcctcgctggtgataacgatcttgcggggcaggccgctgatggtgtcccgcccggcaatttccatcgtcatttcttcacgcaggagtgccgccgagccgatggcgatcttgaccttctcagctcgggcctctccaatcaggaggttgtacgttttcttgaggtggttgatcacggcctcgtccatgtcatcgccgccgatgcgaatggattctgcggttgcgatatcggccagtgacatgatggcgacctcggtggtgcccccgccgatatcgacgatcatggaggcggtcggttcggtgatgggcaatccggcgccgatgccggcggccatcggctcatcgaccaggtagaccttgcgggcgcccgcccgctcggcgctgtcgacgacggcgcgtcgttcgacggccgtaataccgctgggaaccgcgatcacgacgcgcggacggaccaagccgccccggccgtgtactttgcggatgaaataactcagcatggcctcggtcacttcgaagtcgctgatgacgccgtctttcataggacggatagcgctgatggaaccgggggttttgcccaacatttcccgcgccaccagcccgacggcctctccgtcgttcaacacgacgttggtccctttgcgcaccgccaccacagaaggttcgttcaggacgatacctttgtcgcggacacacaccagtgtggtacaggtaccgagatcgatacccatatccatactaaacatgccgaggatcgagtccaacagcacaaccgactcctttcttacgtggctattggcgtattgtgcgtgcccagagggggtatcgtcaagaggattctgactagggcatgccaaaaatcgtcttgtattgtgcgaagcactggaaggcgacgaaggcggacgtggccaccacgacgcccagcgcgacggcgagaatcgccgtgtagagattactgggaaccgagatggctccccgtgattgcggcatcggactcatatgtcactaacctcctggtcgcgaagcgaataccgaacaggcccggtcacgagcggttcacaggttggtggtgcaggtatcacccttacgcggttcggcctggatcagatccaggacgcccacggccttatcggcgtcgacgtcgaggatgacgatgtcacagacgaactgctggccgcgggtgacatggaatttcatgtcctgcttgacgccggcggctcggccgatcgagatctcagccagcgagttcttcaggtcgagggccgtgatgcttccgttgaggccgatgtccttggcggccggaggggccggttggacgatggcacgcgtcggagtcacgggcttgggggccgcggcggccttgccgtactgttgcaggtactggttcaaccgcgtctcgagctcctggttggcctcgatcaactgcttgttcttggattcgagttgcacgacgacggccattttctccatcagcaactggttgctctccttcagctccctgtcgagccgggtctgatcggagcggagcgccacgacatcctgctgggacgcctgagcctgctgcatctggctggcctgagtctcgttggccactttaacggccgcgcccatatcggtgaccttctgtaccaattgggctctctctcgtttgaccatatccaactgagcgctcagatcggaaaccgtgattcccagctctttgatctggttttgcagttgctcctgcgccttcaggtattcggccttcgcagtgtttcggtctgtatcagccgctttgctcagggcccgagccgactggtagtcctgctggagcttgtcggcacgctctcgctggttttctgcattggcgacgtaggtgaccacgatgccgcacaggaagatggaaaagacagtcagtaagacaatcagaaccttcgtaagcgtgctcaagacaggctcctttcacgaattagcgcgttttgtgtttctgcgacacttcattctatcggacgttaggctcaccgcatttatgcataattgggagagccacatcattgccagagattacactccaacccaccgtcccgatactgctactgcgtactttaattttacgcatgaggcctaaaaaggtcaagtcatttttcccaaatagcccaaatagaatgctttatatgcggcctgccgtcgctgggtgcgagttctcggaccttgcggggctctgggtgagcccaaggtccgagaactcgcatccagcgagaagcaccccctggccgtcttatcggttagcgatagtcaggacggctttggcagcagctaggcggacggtcggagacgtttcctggagcaggtcgggcaaatgcctggccagtgtgggcgtgccaatctcggcgatggccagagcggtcagaaccctgatgcggtcggcgctctggggccccaaggtggtcaggacatgtttgtcgaagacggcctggacctcggcttcgccgatggcgtcgcccaatttgcccagttgccgggcggcggccagtcgcacttcgagcagggggtcgtcgagcatggtgatcagcgcgttcttggcctcttcggtgcccagggcgcccatggcgcgaacgccgatcatgcggtcgtcggcataggcgctgatcaggcgggtccagagcttgggatagatgcgtcggtcacccagcatggcgatcgattcggccgcctggagcaggaccttgtcggtggaatcggggcgccgcaaggtccaataaagatactgcagcgcctcctgtcggccgctttttcccagcagcagggcggcgttggcgcggacggtctggtcttcactggccaccgcgtcgcggacgattcggaagtgatcgggctgacccagcttcatcagggcataagcggccgacattctgacattcatgtcggggtcgttcagcaaggccatgacttcttctgttgccagggcgaactccaggtcgcctaccgccagggctgccagaaaacgcacgggcaccgccgggtccgggagcatgcgctggatcttgggtagtagacgcacctcgccgacggtggagattacttcgactgcgttggcccgcacacggggatcgacgtcggtcaggccttcgagcaggatctgtcgtgcttcggattgaggatcgccgaccaggggacgacgccggacggacggattcgcaaagaccgggggagcggtcgccggctgcacctgcgccggtgcttcacagccgcatatggccggcagcaacagaaggaccgatattgtgccgaatacccggagtacgtattgcatattgagactcccgcgcgtcttgatgacttcaccctctatttcgttggtgggcgtgccgacttttgcgccttgcgccgacgcacacccaggatggccggcacgaccaggaccgcgacaaaggtcactgcacaaatcgtgtccaaccactgaccgtggcgactatagaacgtcacccttgtatctatcggcattctgtcggtgaaccatccaaccatagcggttcggcgcatggcgttggcgggaaatccttcactggcggcgcggtagccgtttcgcaggcgccccgtcgagtcgatcaggcaactgatgcccgtattgacgctgcgtaggatagggagacgattctcgacggcccggaagacacaggtcgcggcgtgctggggcaattcgctggtgggtttgacgtgcggaggggcgtccaggaatcggacgaaccagccatcgttgctgatatttaccagccagtcgacgcgcttgcgtccgttttcgtccagcgcgaagttgcgggcgacataggggatcgcgtcctcgtagcagatgatgacgccgaagcggtgcgtcacaggttgcccggtcgcctcggcgacgatcggggttgcattggcgtcggccggccggattggcgtggccatctcgaaaacggtgtagtccgtcccgtgctccagcgagtaatcgtattgatactctttgggtgtgaaccgtttgagctgctggtagagccagttgcagctgcggcggaagggaatgtactcgccgaacaggaccaggtgaatcttgctgtagcggttcgggtcgcgcgtcccgtcggcgcgatagaggaaggcggagttgtagtcgcccagatagcgctcgccttgagaatcggtcaggatttcgccgccataggcgccgacgagaaggtaggcattgcctcgtgcatgctctgcgagggtcttgtggaagatcctatcttcctccggcacggattgcaggaggggccacagttccggctggagcagggcttggaccatcgtctcgggccaggcgatcagctcggcgcctgcttgcaccgcttccttgctctgggctagaagctcattaaagaggtcatcggaggcttggtagctgttcttgaccgactgggggacgttggactgcagggcggctacgatagggccttcggagacacaggtatccgtctggcggaggcgccactggccgtagaaaacggtccccactacggccccgacaaccagcgccgtccgacagagaagcgacaggctggaaggctttctcttacgggcgaaaaacgagtcgagggcttcgcaggccagaagggtaaagcccttgccctctgcctcgggttcgacggattcggccagcctgggtcgggtcgcggcgaccgccaggacaacgtccgcgaaaaaaccattgaccagggccacgacaaaggaaacgcccccgacgccgaagatgtcggcgatttggatcagcgtgatattggcatattgactgtgccccagaagtcgccagtagaatccgcccaggggaaaaccctgaagacgctcggccccgacgaccaggatgggcaaggccaatgtcagcgggatgtttcgggcccggcagaatcgcaccgccagggccaggagaggccagagcagggcgatgtagaaacacagtccgacccagcctggaatggtgatcggcgcgatccagtggaggttgaccatccagtagacgaagccgacgacccaggcgaccagcgccattgtgcggggccgaaactccggcgagcagcccagcgcgaacgaaacgaccgcgatccaggcgagaaacgaccagtccactggcggctgaatcagtgtcaacatcagggcgctgtcgaagaacggtaccgaaagcagtaatagtctcttgattctcatgggtcttcttatcgtgatacctgtcgtatttgtccccgatgttgaacggcgggtcggcgaagatctgattcgcaagcggcttggtgatatcccgcaggattacgatgcaattgcggcggattgatgttgttcttcgattccagcatggccgccattctacaggctcaagggcccttggcaagggcaatcgtccgccgacagggggcctccgccgatcgacctgacggaaagacgtgtgggaaaaagatgtaacagatgcccttttgtcccgtcctaaagagtggaaggtttggccgatatcgttgccattgggaaaagcgaggtacacgcagatggactcaggcgtctgccaaaagggaggtccaaccatgtcgaggtcctttgatgtcaagagtggtcttattgggggtctgctggcgctgctgatcttgtccgccttgggtggcgcgccgtggatggaacgtgattgccatggtcgattcgcgatgatgggccatccgggccatgcctatgtcttcgataccctcacgggacaggtttggtccatgcgggtctatgacagccagtccaccgccacagagcggaccggcgataatgaactgcgtttctacgatcccaaggtgtacgtggcgtccgatcccaatagcctcatctactgatagcgggcctctcttccgtctgaaggccctgggacactgtctgttcggtttacgtaacgggaggcgacaggcctttctcaccgtgtcaatcgcttccattgcgcttgatgtctgatgcgaatcggcttatacagagggttgattcgtactgatgaactcaaggcaaggaaggaaagtctgtgtctctgagaaggtgcattattctgggtatggccttgtatctgtccgccggcgcctcggttctggatgcgcaggtggtggccgggccgctgtcggacgtgaacattcacctgcgggggccgtttcaaaacgcgcgtctccgtttcgagagggagaagaaggggcacgtggcctttatcgggggttcgatcaccgagatgaatgggtatcgccccaaggtcatggctgtcctcggacgccgcttcccggagacggagttcacctttaccgacgccggcgtggcctcgacctgctcgaccaccggcgccttccgccttcatgacgatgtgctcagccaggggccggtcgatctgttctttgttgaattcgcggtcaatgacgatcaggatgcgcatcacgcctaccgggagtgtctccggggcatggaagggatcgtgcgccacacgaggcgccataaccctcgcgccgatatcgtcatcgtctatttcatcaatcccggcatgctcgatacgtggcaatcggggcaggcgcctctctccgtgcgcgctcacgacgaggtggccaggcactatgggatcgcaacgatcaacctggccagggaaaccgccgagcagatcaaggccgggacactgacctggaaacagtatggtggcacccaccccgggcctatcggcaacacgctttgcgcgaccatgatcgaccgtctcatgtcactggcctgggacgagccgatccccatggggtttggacctcgcgatcattcaacgccaaaggcgctggactctcacagctatttccatgggcggctgattgccccgggtaaggccgaggtcagtcgtgatatggttgtccagacgcccgattggtcgaagctcaaaggggcctgccggcagcgttttgccaaattatctctgctgtgcgccgagaaacccggcgcagaactgaccctggcgtttgaaggaaccgctgtcggcgcgtacgttctggccggacccgatgcagggatcgcaacggtgagtatcgatggcgccccggccaaggcggtcaacctgtttcacgacttcagtacgggcctgcactacccgcgcaccgtcatgttcgatgccgatctggagcctggcaagcatgtgttgcgtcttcggatcagtgacgacaaggacgcgcgcagtagcggttatgccatgcgcgttctgcatttcgtcgagaatccatccccacgcccataagttcaaacattcggcaggagatcacagagtgagagatgtctcagatgagttcgttagtgagttcgtgaatgcctgccgcgaggcagggcagcgaggattgatgcgctgtagtagtggcaacatgtctcggcgtgtggacgaagagcgcatgctggtcaccgccacgcgctgctggatgagtcgcctgacggccgatgatgtggtgctgtgccgcatcgccgacggcgccgtgctcgacgggccggacccgaccgtggagatcaacctccacgcgggcattcttctggcccggcctgacatcgatgtggtgatgcattttcaatcgccctgcgccacaaccctggcctgtcgcgacgtgagtcaggtcaactattttgtgatcccggagatagcttactatcttggggccattgggtatgttccgtacctgcctccggggtctacggaactggccgatgcggctgccgaagtcatgcgtcaacacaatctggcgatcatggccaatcatggacaggtcaccgcggcacgcgatttcgatcaagtcatccagaacgcggagttctttgaactggcgtgccggatcattcttcagggtggcgatggcgtgacgcccttgaccgaggaggctgctgacgctctcatcgctgcagggccaggcggttcacgttcaagggtctgagcttcaggccgccaatagatatcagatggagtatcaagtgaagaaggttggaatcattcgttgtcaacagaccgaggatatgtgtcccgggaccatggacttcaaggtggcctcgcaagggaagctggcctttgaacatctcggccccgtggagatcgttggatttgtcagttgcggtggatgtcccggcaagcgggcgattgcacgagcgaagttgatggtcgacagaggcgccgaggctattgtcttggcatcctgtatctcaaaggggaacccaattggctatccttgccctcactacgccaatatgagagacgcgatcatcaagaagatcggcccagagatagagatcatcgaatacacccattagacgttcttcgaaagaggcgttgggaccgttcctctggtcatcgatgcgtggtccggacatgaggcttcaattcccttgccttttccgcgtggtgcccgcacaatggccttgatcgaagcagacgcggtgcctggaatcaagcagaattgatagcgtgtgcactgcacggccgtttttcaatgtagaagtgtcttggggagttgcatcatgcacgagaatttcatgctttgtattgctcgggtcaggcggcatggactgaagtccatcctacagcttgtcgtgtgtgttacggtgttgagcgcgacgggttgttgctgcaacagagaaaacaaggtggctgcgaagagggatcacatgattatcgaccgactggaaaacgccgagcgctattacgacctgcacccgggcttcgccaaggcgtttgcctttctgaagcaaagtgacctggcccgactgccggccgagcggcatgacatcgatggcgaccgcctgttctgttcgatcagcaacgggccgggccgtccccgcaccgaggccaacttggaagcccatcgcaagtatatcgacatccagtacgttattgccgggacggaggagcagggctggaagccgaccgccgattgtcacaccgtgcacaccccctacgatgcggacaaggacatcgggttcttcaaggacccgcccgagacctggaccgaggtgccggccgggtcgttcgttatcttctttccccaggatgcccacgcccccctcgttggtgaaggccaaatccacaaagccgttctcaaggtcgccgtggagtagaatgtgaatagcgagccaacgatggtcagcgttaggactctatgaggagttgcttgacgtgattatggagtttttttttggggggggggaatggccaacgccaagcgagcaactcccgtgccgagcagcatggggtccgtccctggtggttgagatctcggccgcaagcggatagagtgttacgcgtcttctgattagggcgtgacggagaaagcacatgtcgagactacgaattctacagagaccttaagactcggatgcaaacgtgagcagaagagacagaattacgtactatgacgttgccgacatgaattacgctagtttcttcctgacgggactcagcgagaacgagaaccagcgtggctacaaattgactgtgtcaagaagactgcctcctcgccttcgcgaacgaatgatggaggggaagtgggcaaggattgtgccctccgtgtgtgtgtttgagatgaggttgatggagaaggagttctacttttgcatcgacgggcgagatagttgcaggtcggccggagatattggcatggggtatcacttgcctcttctggacgaagtgaaactctacttcaaagtcaactacaatgaagaagcaatcaggacggatcccgatctgaaggcccatgccggtaagattgttcctatggctccatgtttccccttgagaccgaggcgcttactgccgctgttgggtaaaatagttggcgggagcgtcaccacggggagcgcgcgcaatgctgcgtcgaagattaagtcgctggctcgactcccaagtctcgaggagatgcaacgatttcgaaacgtgagcaaggagattgatatattcttcgttagtacattctatggacatgcttaccaccacgcccacatggagtttcgctatgaaatcatgaaggcaataagaagccacggcaatctggcgtctgtagtggggtttaccggtgagcctacggggaaatacgcgtcgttcaaatgtgaccgattccctctgcaagattacctaaatagcttgtccagtgccaaggtggcaatatatgtgaggggattgcatgactgcctgtccttcaagatcgggcagtacttggctcttggattgccaatcgccgggcagacaatttccaacaacagaaaagcattgtatggccatgagggcttctccgaacagtttgcatttgacagcccgagggagattgtgcgccaggctgtgcaactactgggagagcccgacaaacggaaatcgctgggtgaatccaactctagaatctttgataccaagttattcccccaggcaaccgtgagcgagatgttggagtgtctgagatctgatgtgtcctaggttcgttctgatcttggccacactgacactggtgccaaagcaatggtaacgggccgggatggaatggtcctccgcgttcgtcccgttgcgcatgatactgaaagctgagtcaacggtgcgataggcagggcggcagagtcgaggtgaagtggtagcggcccgagccgatggcgaatatggcgcagtggccttcggtgcgtaggaaggtgacgtgaggggattcggatgcgagtgtctcgccttccttgacggcggcggggtccagggtcgggagacaaaccgtcgcgctcgtgttggcgggaatggtcatgtgcagcgagagcatttggtccttgcgctgccacgcgctgtggatggtcccgctggccgagtcgtgatgggccttgacccaggtcaggtcgccgacgatcttggggtgaatgacgatcttcttgaatcccacgtcggtcgggtcgtgttgaatgcccgccaggtgggcgtagaaccactgttgaatatgccccagcatgcagtggttcatcgaggcgctggtattggcgtcccacgcctcgggcagggacgtccagccgcgatcgcggatgaatccgtagctgccgagatcgtgccgattggcaatgtcgaacaggacgtcgctgcgcccatgctcagccagagcctggacgagataggaaaagccgatatcgccggcggtttgttgatggttccgggtctggatgtcggccaccagacgctcgaccacggccggtatgtattcgggaggaaccagatcggtcaccagtgccatggcgctggaggtctgggggctgccctggttctcgtattcgtctcggtcgttgaaataggtggcattgaacttctgtctgatctgcttggccaaggcggtgtaagcggtctggtcctggtcttgtctcagcaattcggctgtttcggttacgatccgcgtgcagcgataaaacgtgaccatggcggtcagttcaggcggggtgaagcgcgccgggccgttgccctggccatgtccatagtcgtaccagtcgcccagacccgcctgcgggatcagatctttggatgtgtcgcgcatgtagtcgacgaaatgcttcatcgtcgcgtagttgtcctccaggattctccggtcgccgtaccgatgatagatctgccagggtagaatcacccccgcggcgccccattccggtgtgtagcgaaaaccgccgctgaacgcggggtagttgggggccaccgtgtagatagcgccgtcggtgccctgcgagtcgcggatgtcacgagtgacctttgcatagaaacaggcgatgtcgtaccggcatgcgattgagggctccatcaggtaacttacttcgagccagcccagtttttctcggtgagggcaatcggtcaggacatgtcccatgttgctgcgcaccgcccagtcgaccaggcgatggatgtcattgaacagggggttcgagcaggcgaacgacccgacggtggggcaggcgctgcgcacgtggcgggaaaccagttcctcgactaccggcaatccatctggattggattgcccctgaggaacggcgccggtgagctccaggtactgaaatccactataggtgaattggggcgaccagacctcggcgtcttggccgcgcagagtgtactcccaatagttgggtttccccacccccgcctggttgactcgacctcgcccatcgttggtgcgttcggtttggccgaagcgctgctcggccggcgtcaggcggagggtttgtcctggtctgccgcgtacctgtagatgaggaacggccgacgcgttctggccgaaatcgtagacgtacacgcccggttcgggctggtcgatccggacgggctcgaacacttcgtacgtcttcatcggaggggctggggacgcgatcaattttcctcctggtccctcggtgacctgcgctgtcgaccagtgtgaatcatcgaatccaggctcggcccagccgttcgccaagcggcgcgcgtcgtagtcgctgcccccgagtatcgcacagtgcgtgatcggtccatccgtcacacgccacgaatcgtccgtgacaagcttctgcctggcaccgtcggccaattcgatgtgggcctggaggatgaccttgggccggtgttgtacactgacgccatgaacacggcggtcgccgaccgtgttgtagaagcccttgcccagcatgaccccgatggcgttggcgccgcgattgagatcggccgtgacatcgtaggttgtgtaataagcggttttgccataaaccgaccatgccggatcgaggaatcgattgcccgccttgcgaccgttgacaaacaactcatgctggcccagaccgcaaatgtaaaccagggcgcgccgaaccggttggttcacggtaaacgccttgcgaaagatgggaagtccgcgtgacgtggccttgtcggacggattactcgaatccgccgggtgcaggatccaccgcgcgtgccagtcggccggttgcagtaggcccatggtccaggtcgccggtgtgctccaggctgaagacgcgccatccccgtcccagacccgcaccttccagtacacctgctgagaggagatgagcggttcacctccataggcgatcagatgcatctgcgagccggtcactctgcccgagttccacagatcggttgctgcttccgtcaatgcctcgatcgacgtggccgctaaaacctgataggcggcttggatctggccccgctcggtcgattgcagggtccaactcagtcgcggccgcgccgaatccacatccaatggattcgggcgatgttcgcatcgcagcccgttcaccaccagattcgcctcggcagcagcgccggtgaccagaagtgacagacagaacgcgagccgaacacctcgccacctggaaagcagcatcatatttcgtgcctctcaaacgatatcagatcacgattcgttactgggcgggacggggacaggcgtctacgaactggagcgattcttcgatcaggatctcgccggtgttctcgcccagagacgtccgcgtgatatactcgtaacgctcgaagctgtcccagtcgaccttggccaggatgtatccgaaggcgtcgttggtcaggccgaacaggaagttgtgttgcccgtgcatcttgcgtttgaggtaatacccgatattgggcatcgcttcgcccgggatggtcagcatctgagcgttggccaaattcacgacgtttagacgcgtctggatgttgtttttgctgtccagggcgaaacccaagggcgacaattggaccacctgtcggagcatctggttctccaccggaagcgtgacggtcttgctgtggcaggacaacttcgggttactctggattggagcgctgccggcgatgcgcagcgcctcgtcggccagacgatggccaatgcggatgcactcgtcccacgtttgaatgtccttgccgttgggaccgcgacagtcggccgtgaccatgccccccagggcgctgttcatgaagattccgacgccgcctccttgtgcctcgatccgctcatatagcggtcccacaaaatccgggcagaggatgccctggtcggccccgatcacttccggatggcaggcgtagttgacgagggtcgccaccgcgttgtgctctgagtcgagaacctggatgacatgacagcgcgggtcgtaaagccgttcggcgtagtagttgtacgcgatcttgccctgggcccggtcggtcgcgatgcggaccaccaccggttgtagcttgcccactgcctcgttgatcgcctcggccagtttcttgcagacgtcgtcgaggtagtccaggtcgcaattggctttgcccgttccgtcggggaacccataacagtcgggaccgctgtggttgtgcgtggccccgatcaggatattctcggccgggatgccgggcacctgcctgtggaccttctcacacagcacgcccgggaagcccaggaaatccgtgctgcagattgcgacgcgtgtgccatcctgttcgagcacgagcgcacggacgtttaaccgtccaatcgttctggtcgcggtgtgggaagggccgaccccgccggaaacaggcagcggcttctcaggtgtcacgtcacgaactgcgatcgctgcgcgaaacgctccgaacacaggacccgcacagagtacgctcactagcacggctgcaaaaagaactgtcttggcgactcgccggaactgttcggtcataatcctattctcccaagcacgatgatccctgacattgtggctccgcaccgttaaggttaggttcctcagaactggtccttgagcgggatcatccacttgggccagtcggtcgactgtacgccgcctggtttcgtccagggcccgttggtgtcaaaggatttgctccacttcagggtccacagttgcttcagcgcgattttgcgcacggaccagtcggcgaagaggacgaactgggcgccgccgtggcgattgacacagagtgttcgcatctcctgaccgcctatgatcggtgtttggtggccttgcgccggaggttcgtcggtgtctcgaggccagccgtccacccaccagctttcggtgaagaccggaaccctataggcgcccttgatctggtacgtccgccagtaatcgttgatcggtccccgtccccagaggtcggacaggccgggcctggggttacacatccagccgttggggccataactgcccacgtcgccgccatgggagacggggacgcgccaggcgtcgaacggttcgctggcaagggccatggcgtcttccgaggcgccgcttcggtgtttccgggccgttgggcacagccacatctttttgtccttcgagagcggtcgcatacattcccgccaccagtctccatgggcgacatctcttccaaagctcagcaattgtccgctgtagaagttgccgttattgtcatcgcagtacatcgagaagatcagaccccattggtgcaggttggatttacagcccacgccgcgcgcctgacgccgcacccgctccagggcgggcatgagaatgcccatcagcagggcgatgatggctattacgaccagaagctctatcagggtaaaaccgctttgttttcgcatcgtcacactcctatcatagattccgctgaaagcttcatagaccctatgatagcctaacgaggcatgacaatgcaagtgatctgagcggttgaggtcaactggccaggatcatgccgatgatggcgagtgtcccggagatcaacatactgatcaggttgtcgttattctgttccatctgagcactctttcgactccttttctctgagagtgctatgcgcggaggttccacggagttctgcgaaaatataggatttgtgagcgttggatggattcgtacggaaggttggggccagacgtatcgaaacgggggggcgcaagaaaaaagggacgcccatgcctggcatggacgtcccttcggggtcagtcgatatgggtgggattcgtcagagtttctccttcgaatcgcccggtgcggccgggtctttcttgtcgtcaaccggctcactcggtccagtgagatccaccgatgccttggtgtcatcgcacggctccggtacggtgaagagcatgaacgacatgtcctcactgacgccggtctggtcgtagagttcggtccactgccacgtggcggtgaggctgtcggtgcgcggctctgtcgccacggcgtcgtcgttgcgtcccgctccaaccagggtcaggacatcctcggcgcccagcgtgatgccgaagatacgcacatcgtccagcagtccgttgaggaactctgcgttctcatccccgcaaccgccgatgatcagcgtcgcctggaccggtgcgacgaaaccgcccgtattcgtggcggtcgcatcgaggacaccgttgatgtagagcttcatctgacgtgtgccgccgtcgaacgtggcgaccaggttgtgccactggttcgccaggaggctctgcgtcgtctgccaggtgttcaggcccacgcggaagtggaagcggccctgggggtcgatccacagaccgaagcgattgccattggcgcttgtcctgtcgtactccatgatggcctgccagccgcccttggtctgtcgggggttgacccaggccgagacggagaaggagccgggggccaggtcgaggcccttgggcttattgaccttgatgtagtcgcggtagccgtcgagattgagggccccgccgagatagccggcgccgggctgccagagaggattacccagcagggcgccgtcgttgttattgcccgagctgtcggatgccgtggtgccgctggactcgtccagtttccagtgggccaggacatcagctccggacaggtcccacagtttctggggatggttggtccagccccagggataggcgatcgtctggggatcttcatagaccgccacgacgctaagccagtagacgtcgcgggcgttcctctggcagaaccattcctcctgtggcaggcgaacggtgtagcgatataccggttcgtggccttgcgtcactgaactggtgatctgaggatgcttgtcgaagccgaccaggacctcgtcgaaatcatcgacgcggtactcccagattttctgggccggataactgaacgtggccgggttggccggtgtcgggtccggcgcgtccgcccagatcgacagcaggaagtagtcgggcgcggtcggtggcgccatctgcgtgcactcgcacgctcggtaggcatagccgatgtaggagccccaccaggacaggccggtgatcggcgtcgggctggtgcactgccagtcgtcggcgacgagtcggcggtaggtcaggccggagcccgccttttcggtctcgatctcgaaagccaggtcggccgatcgtgaggcggacggatgccctttcgggaatcgcaactcgccccaattgccgccggcataaggttcctctgccagcacccacacggcgtcgtcgttccagtggtcggccgaagccttccatccgaagcgggtcgctgtgctgcccggagcgtggatgaggtaggcctgagcgcacagccagtagacctttggctggctgggcgaaccggtttgctcgaaggcctcgtgggcgtcgatctggaagttgtacttgtacatggccaggtggttgttctgctcgaaggcctcgttgcacgggctgtagaagctctgagtccgcgcctcttgcggctgggccgtgaattcgcccggtttgaagtctttgcgccacagcacctcacccggcatgctgtaacccgtctggctgcgatcggccgagatgtcggcgcgaatgctgagggtgaatgtcacgtcctcggcgttgttgttgggcagaagatcgtggtaccacgcgccccagagcgagatgcccgtgatggggccgctcgtggtgcactggaaatcatcgccggcgatctgctcggaccatgtgggcgggatgtctttggtgatgtcgaccgccatgccgttagtgctgatgtccgggctctgcgtccacttggcccccggcgtcgatccgctggttgccagcgactcttcgtcctcgtagtgggcccagtgacgcaggcccgtgaagggctgctcccacttgatgaaatcgggatcggtgtccagttcgaaggccatgtcgtacatgtccagtcgttcgcagatgagcgaattggtgatcggctggaccagtccggggtcggccatgatgcccggccgtagttcgttcttgcggaattcgaaaccgatcgccccgtccatccatggctggggacgcgtcttccaaccccacgcgtaatcgggctcgggatatccggtgtagaccgcggtgatgctgatccagaagacgttgtcttccgtgttcttgtcactgtaggcaccctgccagaaatactcctgttcgtcgagatcgagcaggtattggaagcaggtgtccgagggcttgccggggaactcatcgagcccgacgcgttcgatttcgacgcggctggcggtggcgctgacgacccacagcaattggccgggccgactgaacgcgtatggtccgccggccgggacgttgctccagaatccgatgcgccaggacgcgggcttggtttgcggcggcgcgtcggcgttccatcccaaatacgagccccaccagtggacggatgtcacgggcatggcgccggcgcaacggaaattgtcggcgacgagtctccagttgctccacgcatagtccgaggcccgactggtgaaggccggttcgtcccatccgcagtagaccggtacgttcgaacccggcaaccattccagcggcggttgggaccatttcagatgctcgaccggtggcttgctcggtatgaaaacgtcctcaatgctcacctgatggtcttccacctcaccgtccggggccggaccggtatagtcgagaccgcgcatcgtgctgaagcgccaccgcgagaatgtcttcgtggacgcggcgccggccggtacgttgaacgtcagggtgttgacccctgaagccagcggtcgatcgatgaagatctgctcgcccgcatcgtcccagtcgttgtcgctgttgaaatcgatccaggcgttgagcacgccggtggtggaggcagtgacctcgacggtggctttgctgcccggggccaggacggagacgaagacgacgccgtcctcatcgtcgttgctatcgctgtcgtcgccggtagccgtgatgtccggctgcccgtccgggtcggcgtcgacaccgcggccgagatagacgcggggctcgatcatgtggcgggcgccgtcactgatgtgcagcgtcggataaggtcgatccggggcgtcgccgaaatccatatccaccgggggcggtcccgtgatgaccagcgagagatccaacggctgactctcgtacgcatgccccccgggataggccatgggcatccacccgagggtgggatgcagccagacggcgctgtcgttccattgcagttgccgctcggaggttttccacccgaacacgtagctggtgtcctggctcgggacctctttgatttcgagccagtacgtggtgccgagtttctggacgaagagttcttcttcggcctcgtcgaagcagatgttgtattggtaggcccgtttgtgattctcgggctcgtagaatttgctggccggatcgaaccagccttcgggaatgttgttggtcacttgtgtcacatcatagctgaacggcaggatctcccgggtccagagaagcactccggggcggctccacgggatcaggttgtccgccggtcggtctgaatagatgttgatctcaaaccgcaggctgtcgacccccttgaccggcgtgatgtcgtcgaggaacgaggcccagaaatggacgtccaggatcggaccggtctcggcgcaacggaaatcctcggccaggctggtccagtacatgtccacgtccatgcccgtcgagcgcaggtcgggcaactgcggccagtgcatcttgtgcgggtccttctcctgccagtcgcagaagaccaggggttccttgacgtggaggagatagtcttcggtttcgccgtcgccgaagacgccgtcaccgttccagtcttccggcacgggtcgttcggtgatcgagaggcgagcccagacgtagccgccgaagggacccagcttgaaactcggaggggtcaaggccgacagcggaccgtcgtaaccgttgggtacagggaagttgaccaggacgtgctcggggctgtccccctcgggacatggcacggcgccctgccatttcccgtcctggttccaatcgaccaggaggtttacgtaggcgtcccgtacgatcggcagccggttgtgaacctcgatatcgatatgattgccccagagggcggtcaggcaggcgttgggcagcgattcgaaaccgctgaagatcaggggccagacctcttcggagccgacggctcccttgatcgtataggcgcgtggtttgagcaagcccgcatccccgtcctgctgttcctcgtcgaggttgtaggtgttgggattgaaggccggacaagccccggcgttgccttcgagttcgatatccaccttgggtccgaagtagaggtagttcgtgtcgtgctcgatccaggcggccggcccgacgccgacgcatgtggggaacaggccgactacgccggaggccggataggccagcgccccttcgggcgcatcgccgaagtctcgttctccgagggggccggtcgggtcgtccttctccatgcactcgtgtcgaatacggccctcaacgctcacattcgagccgcggatgtcgattgaaacccaagccgggcagaatccctctatctcgtgggaggtgttgatgaagatggattgctggacatcgcgtcgcggtacgacgatgtgccgttcgatcaactggttttcgtggctcaggttgatgatatcatacggtagcgggggagcggggtcccctgggtcggaagaccactggcccgtcgtccagttcaaggcgacctcgacggaactgccggttgccgcggccggattgaggacgcggaaagtcaggtccacctcaatgactttgcgacgcgtgctgtcgtagcggccattgaagaaccactgattccaccagtctgtctgggggtagtagaaccaccctccctggtcgaatccggtgccttgaccggcgacgaagtgcccggccgaatcgatgtccaccgagaacacgtcttcgaccgccccggccgagccgacgcccaggcccagcgccaggatcatgaccgcgacaacataccttgaaaaccttaccttgaacccgctcatggcatacacctcccaaaaaatgaccttacgcaaagccagcgcaaccacccgtcggggacgagcgatttgactgcacacttacagcgcgttgattactttatagttccactgtgcaatcgacttgtaacggtatttcctccaacaaaaagcaggtaacggacgttaaaatcaccaccactccctctcctaatgtcatcccgagcccaatctagacgcagtgcggcattatttggggttcaaggccgactttatagggcggtgtttttcccggacctgttgtctcagcgggttatcgggcgtgttttgccgtcccaatgcacgtttgaaccggtatcgcagccaccagtccgggcagggcgcaattctcgtttttccgggaccttgccgacgtgaaaacgggctgatttcgacaacatcgccgataatatcccctatttcagggccctgtcgtgggccggaaacggacggtaacggcatgaacgaccgtgttttgtgtgtgtttcgcttgtacgttagtgatagcaggctgtgtttgttgtgtaatatgcctaatttgcctggggctgggcgatttagtcaaaaagaggggctttactcgagggcggcgcgggattataattccggcattagtcctcggcggcgccattgctgagggtaagaagggaattgcggcatgcaaaacatggaggtcctcacgaccaggaatccacaagcagtctcggccagggcgggcggccccgcaaggatcgctgcgctttctcgatgtgcgtgcaaaggcctggcccatccagcggaaagggtatgagtatgcagacaatcaagacgacgaccccagggtccgactcggacacgagcacgtcatcgaccaagctgcacccactctcgaatcggatcgtcaagtggtatatgaacctgccggtcgatgcgaagttggcggtggtgctgtttcaagagatgttgcgggccgagaagcagatgccggatcgctacttgggcgaggatatccgcagcaaactgagcaatcagatgaaggatgagaccatctcggaggatcgcggcgaggtctcgctgatgcacggcctgttcctgatgatgcagggctgggacacctagatcgggcccgtcgatgggggccgcctgaacaagccccctttttccgttgcatcgaaaggctacggcttttcgtcgagccagtcggaggccgccagcgcgagattatgcaggtccagagcggccttcacgtctccgttgtccggttcaggtttctgctcggtatcgagtgcgccatacgtggtcagttggaaggccatatcccaggggacgccgctgccgtcttcgacggggaagccttgtagccactgatcgccctcgaccgggggccacggtcccggcgtgacttcctggatccaggtgcccgtctcgctgaactgatgcgttcgcgtcagccagccccacgtgtggttggcgcccggccccttcgtgtcgtagatagcggcgatgctgatccagtagaatggctgctcgccgtctttggacgtcggctcgaggggcggatggaaccactggttctgtgagagcggacaactgaactggaagcacgtttcgcccaaccccgcgtccttgccggcttcctgatagcctgcgatggcccaggtccaggcggtgcaatagttttcccagatcaggacgcctgggtggccgaacgtgtcgagagggcccgacccggcatgggggacgtccgtccagatgccgatgtggaagcccagcggctgtaccggcggcaggtgggatgccgtccagttgtggaacgcgccccaccagtgtatcccggtgacaggctggccggcttcgagttggaaatcatcggctgcgatctgatggaggcccagcgccgacagggcggtgacgccgtcgaagagatacggggtcgtcagggcaatcgccgccggtggctggttccattgcagggcggtgacaccagaggtcgggtaaggctcgaagtgccgggtgatctggacggcgtagtcttcgacttcaccgtcggaggccgggccgtcgtagctgagcaagccacgcgaattgaagcggaatcgcgcgaaggtggtgccgaccagggcctcttccgggacggcgaaggtcagggtcttggcgccggttgtcaggagggcgtcggcgaatatctgctcgttcggaccgtcaaagctgccgtccccgtcgaaatcgatccacgcgttgagatagcccagggtcgaggcgacgacctggacgctggcggattcgccgggctccagtagggaggtgaatgtcacgccatcctcgtcggcgccgttgttgtcatccccggttgccgtcgcatcgggctggccgtcgatttcgctatcgacgcttctgcccagaaagatgccggagaccatcgtgtgccgcgctccgttgtcggccaggagcgtggggtagtccggcgcgtcgccgaagtccgacgagctggactgcttgatgcagtcggcgcaggtgcggccctcgcccagggcgacgtaagaatcgacacagtcgcctccgaaggtgacgtagcaatcccccgtggaccaacggcaacagatccggtatcccggatcgccgtcgtccgggtcgccgcccggctcggtgccgtccttgggttggcactcgtgccacgcgccgcgatagatacgcgcattgcggccgatgatatcgatggagatccattcggggttgtatccctggatcgtgtagccgcggaccggctcaatactctcgaagttgcccagattctccaccagatagaaatggtggtcggacatgtacgtgacttcctcaaccatggtcgggacgtcggtgggcaggggaggagagcccgtatccagggccgaccattccggtgtggtccagttgtagtggatctccacatacgacgtcttgctcgggtccaccggcatgatataggcctcgaaattgagataccccttccggtccggatcgtagacgccgttgttgaaccacatgcggtagcgatcgacggtggggtagtagtaccagcccaggccgtcgccgtcgcccatgatgcggttgccgtcgtcgtcgaaggcgatgcgataccagacccccggatagtggctcgggtcttcgatttgggcctggaggggtgaggatgataccgtcagggcgatcaacagggcccacgtcaagaggaatccggatctcgggcgattcatgttcacactcctgtgccaaggtttcgtgcgcgcgcaaagacgctcttctcttcctgagtgattcgtgcgccgatgtccctctcggcgatgcaccggcgcctcgaccactgatgtatgccatcgacagcgccggcttttgggtccagcaaaaagcgcggaaatgcggcgaaaaacgcgtcaccgacctccgaaaagaccccctgaacaactccctataccctatcagaaacgcccactggattcaatgaggaaattatcggaccggttttccggcgatgttcgggcgctcatccccgccccggcgaccccggatacgccggggcgggggcggattgttcctcacattgcctcgtcgaactcgtcccggtaacgggcgactccgccggcgcgtgatttgagggacgtctcgaagaagaggatcaggaaggcctcgtccggcacacaccctcccactggctccggaggtggtaggcgcaggcgcgctcgaagccaaagcgggggtagtattccggatgtccgagcacgatgacgaaggggcatgaccgctcggccagcagatcgatcccacgcttgaccagggccgagccaatgccctgacgctgtcgtccgggctgcaccgccatgggcgccaggcccataccttcgaccagtccctggtcggtctcgatggtcgccgggctgaagagaatgtgcccaacaatctccccctcgtccagggcgacgggcgaaagcacgccggggcagtttgcccggatcttctcaacgatgttcgcctcttcgggctgcccgaacgcctgctcgttgatcgttcgcaccgccggcgcgtcttctggcaattcctcgcgaatcacaatcattcgcagctcacctctgttccctagtttcctgagacgatgtaatagcgcgcccctttgcttgtttcgagaacgtccagacgcatagtcaggttgtggattccatgggtctcgaagtaacctgtccccgcgtagggaaccgtcttcccgtcaggggcgggttccccaaagacgtataccgtattcccgtcgtttttgcagatctcagcccagtttagcgaggccgtcccgggccataggatatgcatttcatcgtagtctttcttcatccgcgcgttccagaaggcttcacatacccctttgggtgactcgggccaatgttctcgcttccctatcaggtcgaaggcctgggctcttgcctgcgcaaatgggtctgtcacgcttggcggggtgacgctattgttggtgcccgtcattctcagcaagatgagaactccaacggacaggcagacacaggcgacgctggcgagaaacatggctgtctggggcttcatcttcatgatacacctctcagtctggaggatagagggggcttcaccgatgcggttaatccgttgggctgaaggacgtaaggaacagttctttggccttgtcgaggccctcttcgctcatcgctacggatttggccttgcccttggggtcggagatgtagcctttctgatgcaggcgattcatggtctcccagtcgaagctcttccaggcccgcgcacctgagcctttgtgttgttcccacgtcaccagataaagaagcgccaacgtgtagtcgtcaaccttgtcactgtcatagtccatcattggtcctttcgtcgcccaggatggttgccaatgacttgcgaaatacggtggcctgacgcatcatgcccacatcgttgggatgaacgccgtcgaccgtgccgtcaccgtcggttcccagcatgttctcattggataggaaatgcaggttcgtgatcccttgggatttcagctcttcgtagatcgtccgaacgatggcccctttctcggtcggtgtcgtattgctgacactggaatcctcggcgagcaagatgggcgtattcgggtgagcctgacgcagtttcttgatgaagggctcgacgcgttcggcgaccatctccgaagtcatgttccagaggcagtccaggacgtagaccgccgggtctagctcggccaggaggttggccatcgccggctccatcttgccattcccggagaaaccgaggttgatcaccggaacgtcgagctgccgttgcacgatggctgtacacgccatgcccgggcgggaggcgcatccgccttgagtgatggatgtgccgtagaagacgatcggcgtgctgtgtttgtggaaggaccttaccggcctcgaaagggcattgtcctttgggattcctatctctatggtcttcacgccattgtacagcggaagatagagcatgcattccgtctgctgtgtcaccgcgaacgaggcttcattcgacaccccgagcggtcgaccgttcttgcgaaagacccacgcgccgtccttgttcctggtatacaggtcgattccgctgacgcccgtggcgggcatgtggggcatggcaaggtttcccttgcgaagggtccagcgaatcttgacagactttgcatccgtcgcgaagtagacgcacatcccggccgaatggtggctcagactccaaaccgggggccgaaccgtctccttggccttggcgggcagacgatcgtagtacgattcggtctcctcccagcccttgccctcgattgcgagcagttggccgtcgtaccacaccgtgttgtcacaagggtcctgcacgccccggcgcgggtcgattctctcgacagcagcggcgccgagcgtaagcggtagaagcagagctgccagcaggcaatgaatcggtctcactgtcgtttcctccaagtcaaacaaacgaactccaaagcgtttctcgcgaagccatcgcgcctcacttccgtttctctatggggaccgcctcattggctgaagcccccgaggttctgtctgtgcgcgggccattcggcaaaggcaatgtagaaaggtagaacgatgttcgcgatggggacgagcatgagcaatgacagggcccccgggaagcccgccttcgtgcaaatcttccagaacggaagcacgttcaacaggatcacaacaggaaatattcccgcgatcacgagcatttcataaaatcccggcatggtatttcctttctccgcttcaagcctatgtctcagttgtcacgggtgttgcgcatgcaacaccctgctcctacggcgtcatgttacacggaaccggtctgcaacgccacgatgatacgtccgatgcggagcatctgcaaatggctttccgtgtcaaatggcgatgtgaacgggcgtgatgttgagggccttgggcatgtcgttgggatcgatacggacgagcaggccgcgatgacccgcgttgatatagatgcagtccagatcgaaaatgctttgctcagcgtagacgttcatggcccgccgggttccgaagggactggtcccgcccacctggtagccactatggcggtcggcgaccttcggttcacacgacgcgaccgatttgactttcaaggcccgcgccagttgcttggtcgagacctcgcagtcaccatgcatcaacacgatcagcgggtccctggtattcgtctccatgaccagggtcttgattaccgcgtgctcgtccacccccagttcggccgaagaaacaccggtcccgcctttgtcgacgtagcggtacgtgaagacttcgaacgggatgccatgcttgagcaggcaacggatggcgttcgtcttgggataatctttctttgccataacggaatcaatcgcgtgcggtctgcacgttgccttgccgttcctccagaatcactctgaggggaccggaatctcaacgttttcagagacgggatagcccaagcaaggctcgccttcgacattccatgtgaagcgttgcatgcgggtgttgcggttccacccggcgccctgatgcttggcggcgtgatagacgatccaatcttctctgccgtcggggctcttggtgaagcaggcgtggcccgggccaaacaccgtttttgttgagctgaagacaggcgtttcctttttcttccatgcctcggggtccagcgggtcttgtcccaccagcttcaattgaccgaggcaatagtcgtcggtccagcttccactggccgaatagatgacaaagatgtcgccattgtgcttcaggacttccggcccttcgttgatgaggggacgacctattctttcccaatcgtgctcgggttcggagatgagcgagcgcggcccgtcaatcgacaggggattcttcatggatgcgatgtacaggttctgccgcacgttcgcatcaccttcccagcccgaccagatgaagtatagttgcccttgatagtccaataccgtcccatcaatggcccacttgtccgatgggtcggtgatcttgcctttgaggatgtaggggccggcgggatcggccgtggcgttctgaagcacgtacatgcgatgattctcattcttgccgtcatcggcggccacgtagatgtaccactgccctgcgagcttgtgcagttcaggggcccacaattccctggagtaggcctgcccgggttcgggacgccagacccgcttgccggtgaattggacggcctcttgaatcgtccggctgcggttgacccaaatgcatccctggtgagaatagcagtagtaatagaagccgctgtcctggatgatccacggatcgtgaccgtcgggggcgacgggattggtcagagtgcggggggcgcctgtcgcgatacttgtcccgcacagaccggctgccgtcagtagagcaatcacgagcattctaccgtgttggatcatgaagtcctttccgaatctctggctgtggcaatcaacgaacagacatgataacgcgtcccggccgaattgcaacgaccgcccacgccactcgttcgccagcgggcgtgggtcgatgaaaatcgcgtccgtttcgttgcggtcgtgaacaggccggttataatcgccgtacggcaggggaatggaaaggatcgaaatttggatgtagagcctttagcagtaaagcggttgcccatccggctggccgccgacccggcgctgacgattactcggctgttctgggccggtcccgagcgggcccgcaaggtgatcgaccgcgttctggcgctggacgaggaccaggtggcgcgcctgctggcttcgaccatgcgggacttcgaccacctgcacatcgacctggaggacatctttctcgaacactacgagcaggtctcgcaacggatccagatgccgactccgccgacggtcaagagaatggtgctcatcggcgcctactttaccctggaatacgcctttgcctcctcggccttgttcaacccgtccatggcgcccgccatcggtcaggaggatctggaaccggggtctctacgcttcgccatgagcctgcgggcggtcggcgagggccatctcagttcggtggtgtttcgtcggggagtgatcgattcggccggtgatatcatgatggaaccgaccgggctgtttcacgagccctcgcgacgagtcaggaaccgtcagtttagcaaggccaagtttcgtatcaggctggcccagatggggatgcgtgacgcgatcctggaccctctgttggagcgactggacgatccgttcacgttccaggacctgctgcacatcgtcgatcgggttcagacgcaaaccgaagcggcctcggcgcacgatcacgaagcccacggcttcgaatggctcggcgcctgtgattacgatatcgagagcgcagccggcgccgacatcaccgaactggtgctcttcccgatcagcgaggccgaatcccggggtatggaggacatgcgcctggtgcgttttgtcgacgacgacgggtcgccgcgctactacgggacctacacggccttcaacggtcacgagatcctgccccagatgatcgagatgccccgtccggggctggcccatgtccgcacgctgggcggccgctgcgcccggaacaaggggctggcgttgttcccgcgccgggtccagggccggtacatgatgagcggccgcatcgatggtgagaatctctacatcctcaagtccaacaacatcctgctctgggacgaggcggtactggtccaggagccccagttcccgtgggagttcatgcagatcggcaattgcggctcgcccatcgagaccgaggccggctggctgctcctgacccacggggtcgggcccctgcgccactattgcatcggcgcgacgctgttggatcgcgaggatcccacaaagctgatcggccggctcgaacgaccgctgctgatccccgaggccgacgaacgcagcggctacgtccccaacgttgtctactcctgcggcggactcgtccacaacggtatcctcgtcatcccctacggcatcagcgacgccgccaccgggttcgccaccgtccccctcgacgatctcctcgcccgactcgcctgaccgcgagacgctactgctctgcgaaatccatttgggtgggctgtcctgccgagaacgtcgcccatttactgcccaggttgtccccggaagactcttcgaggtacaccatgcgccggcctaccggcaatcctgtcggttgcgaaatccacctgggtggcctgtcccgccgagaacgtcgcccatttactgctcaggtcgtccccggaagatgatttgaggtataccatgcattggcctatcggtaattccgacaacttgtagcatccgttttcatcggtcttcgtgctccgcctgacgacgggacaatagctgtgctgcaacttgacgtcgtcatcgtgggtttttctcacctcgacgcgcagccccggtctcggcaggccctgtttgtcgacgacgaccccaaaggcgctggcggccgccggcaagacgatctgggtcggcgcgtcatcggcggtctccaactcgctccacgggccccagtgtggcgcgaagcccggcgcggtcacgtagagatactcttgatcgtcgcttaccccggaaatgacaaagacccccgatgcgtcggttgcaaacttttgccaatgagccggttctcgacgctcgctcaatgcgactgtggcgccctcgatcgggttgccctgtgcgtcaaccacgacgcctgcaatcagggtcgccgtcttgagtcggaacaccgtccgattcgggtccggcgatatgggctgtaccgctacagggtccagcaccagcgcatcgtagccttgggcgagcaccgtcattcggtatgttgcgccgatggggaaatcttcctcctcgccggtgtcgaagaagccttgcgatgattggaagatgaccccttgccgattccacagcgctctgtagccgtacgttggttcgtccaccttcgtagcgctcagcttcaccatgaacttagtgatcggttcaccggtcgcatcggccaggaccttcccatagatgcgcccggcccgacgtacgacgacgatatactcgcctttgccgagttcgaatctttggatttcgccggagataccgccaccgaacggattaagacgaatcgtaccttcacttggggcgttggggatgatgaaccatccctcggcgtcactgacgtaccgcttgtcgtcgaggtttgaagcgtcgtcgtattcgtgaatcgccactttcacacccggcacaggctcgttcgcgtcatcgacgatccgcccatgcagcggcacgcccacgtcaagctgaatgtcgatttgcgcttcgcttgcatcttccaacagctcgaggcgctgtacgtgcagggcatggctcgaatgcacggcccagagagtcagtttgccctgatccacgttctccaaccgataccagccttcggcgtccgtcttgctcgtgaggcagttccacatacaccgggaattggtattgccgactgtcaccccggccaggggccggccgttcggatcggtgacgcacccgtaaatgttcactcctggcttgagaatcacgtcctgatggactgtctggcccgcggcgcccggtgagaaccgctgtgacacggcgggatagtccggatgggtcgcgtgcagagaatacgtgcccacgaccgggctgagaccgtcaatctcaaagcggccatccgctcccgtgacggcggggcggttcgtgaagaagaacgtttcgaccgtcgccccggcaatgggattgccttcgggattggtgactctgcccgccagacgtgagccgcgatccagttcgaccaggatcccttcagtcacctgacctcggacgataggagtgacgattcgctgcgatacataaccgtgggcgatgacgcagacgtagctgcgctgcatcgggtaaaggcctgtgaggagaaaccggcctgacgcatcggtttcggcgtgggtgttggaatcggacacttggtatccgacccgcactccggcgatgggcttctgggtcagcttgtccagcaccatgccggcgatgccggtgacaggctcctgcggagtggttggttccgttggaaggacactgggcttggcagcgggtgcgttgggctcggtggtctcgatctgttccggttccgcctcggccagtcgctcccggatggcgtcgatggccttttggaaggggttggcgttggggtcgccttgccactgggttgcgaagggttggagggctgcaatggcggacgcgtcgccgatttggcccaggtactcggcgatctttgtttgagtctcgttcgtgcctctctggagtagggacaccagccccgcgatatcgccttgctcgtagagggtccgggccagggccagttcgtcttggacgcgatctctgtctttttccggctcgacgaccggcctgtcttccacggcggtcggttccggcgccggttgtggtgcttcgcgaccgatgaggtggttggccaggatgaagatgccggcaatcagtgccgcggcgaccgccagttttgtaatcggacttctcatgatccgtctcccgaactcgatcacggcgggcagtcccgcatgcgatggagttctccgctgcgctcgccgggccagcgacgccaaggcctgggcgtgggcgctttgccacgcggcaaagtccggcctgggcggttcgcctggaaccgttctggcgatggcgtcgtccagccaattggcctgttcgggacgtttcatgatggctgtccttcaggatacccgtttttcttgagcgtccgttcgatctttcttctggcgcgaaagagtcggcctcgcaccgtatggcccgcgatacccagcgtcgtggcgatctggcgatagtccatcccattgtagtagtgcaggacgacgatttcacggtacatcggcgccagttgatcgaccgccgccttgaccagatccaggtccgaaccctccgtctgcgacggatcggcgcaggccgtctccatcggcggtggtggggcggatcggtggcgatcgcgaatcaactgatgggcttcgttccgacagatgcgcgccagccacggcctgaaccgatcgatacgcttcagatcgctcagcttctcacaagccttgacgaacgcctgctgagcggcgtcttcggcttgggttcggtccagaagaatcgagtaggccagccagaccatcgtcgcgtaatgacgctcgtagagcgccccgaaggacgcggcgtcgccccggcgagctgattcaacaatttgtgtttccgtttcccgttccaacgttcggtcaacctgtaggcccactcactgatcagtgacactctatagatacacgggccgcgcgaaagtgcgcagggaaatgcccggagtcgagaaaaaaccgctcggagggtaggagacgcttcagtgcgtgccggctaccgctttcccttatccacttctcacgacctcaacagcggcctaaccgccggcgccatctggcacttctaaggtcccgccttgaggaagctatggcggacgggctgtttcttcagttcggcctgggtgggcagcagttcgaaggactggacgtgctcggtggcggtgaagtggtcgagggtgcgctggatctgggccatggtgcggccgtggagcatggcgaacaggttgtacggccaaccctcgaaggtctcacgctcgtagcagtgactgacggtgcccgaatgggccagccagcggccggcctcgacgatatgcgcttcgcccacctgggcggcgaacatgacgttggcggcaaagcccagtttgtgatgattcaccacggccgccaggcggcgcaccacgccacgctccagcagttcggtcagcagggcgaacatcgcttcgagttccatgccctcgggcgtcacggcgtcgaagggacgcgctgtcaccttcaggcccccttgcagggcggccagcacacgccggtgcgcctcgtccaggtcgacggcctcggccttgggtatgcgctcgacgtcctggagcaggacctcgtcgtcgctctcggcgtcgaagcgcacgtcgagtttgaagatccgcgtcacgggcagactgtggaaatcgatgccgaacttcgacgccagttcgctcagggtcgcctgcacctgggcgggcgacgcctcctgcagcgtgaaccacatattgaagcggtgctggcggaggtagttgtgcgagacgccgggcagggcgttgaccgccgtggtcacttggggcagttggtcttccgggacgtgagcggtcacgagcgtgctgctaaagcccagggcgcgatagttcaccacggaagcgaggcggcggatgatgcccacttttttcagatgtcgggtctcggccagcacctcggtctcgctgctgtcgatatccctggcgatctcggaaaacggctgtggacagagcggcagcccgcgctgcaggcgattgcacaggcgtttctggaagtcggtcaactccagactcatttctcctcccgaggctcgtaccagcataccggatcttcggccaggtagtcgcctgtcatggtgtaggcgcgggcccggcagccgccgcagactttcacgtaggcgcacgagccgcacttgcccttgtacgacgtcaggtcgcggatctcgttgaggaactctgatttgtcccagatcgccgcgaagtcgtagccgttctcgacgaggttgcccgctgagatatccaggaagccgcaggtctgcacgtcgccgcgatggctgatgaacccgaagccacgaccgcccatgcagccgctgatatgtacgcgcggctcctgcaggtttgcctcccgatagacgcgtgcatactgaggtccacacgtcactcgcagttcgatggccaggtcgttcttcaatgccagcaagtcactcagtagctcggcgtattgattcggcgccaggatttcttcccggatctcatcaccccgtcccgtggggaccaggatgaaggggttgaagcagtaagcgccgagttggcgggccagttcggcgatcgcaggcacctccgccagattggtgcgggtgatggtcgtattgatctgaaactgcaggcccgcttcgtgcgtggccttagcggctttgacgaccgtctcgaaagcgcccggcgtgcgccggaaggcgtcgtgagtcgcggcggtcgcgccgtcgagcgagtaggacatcgccaggacaccggcgtccttcagctcggccagcgaggccgcgtcgatcgcgtagccgcaggtcgccatcaccacgcgcaggccctggtctctgccatgccgggccagttcgagaatgtcgtcgcgctcggtcggctcgcccccggtcagaatgatgacgcacttctcgtaggccgcgaccgagtcgatgatcttcttccactgctcggtgctcaactcgtccctgtcggccgtgcggtcggcgttggcccggcaatgccggcagttgaacttgcaccgccgcgtcacctcgaacgccagcaatcgcggcttgtgattctgtagatgtttcttcataggccccagactctatcgaaatccactccaaccgtcaatgcgcaccccttcagcgtgcccagtggccttacgctggtccggcgaattgggtttgattggctctgtttttctcgcataatcagcgttttcagcccccaaaacccggtaattggctttgtttcgcacaattgagtccatcgccaccagccgctcggtacccgccggcccaattgggttcgtttggcttcgtttttccgcccgatctgcattattagcccaaaaaggcagggaattgggttcgttttgcataaaaagggtggctccggccagcccttggcacccgatagggcccgccgcctttgtctcgttgcggagggcagtgctcgcccgacccaggcctgccggccggattgatgagtgagtatttgatatccagttttcatgttcggtggttataatacaaacatcgatgcccggcgtcaagaagaatctcaccgatcctcactttttctgcactttcattttcccccgtgccgcccccgtatctccagctcagacatagatttgacaccctgcctacgtctctgtaggctgtatctgtaaacgtgcttggggaagctatgacaggagacgtcccggacacctgtggttccccgagacatccggttcagagggaggaacatgatgcgcatcatttcagtgttctttgtcctttcggggctttcggtggtcttggcgtaggagggcggcgcagaggatcagtcgcgagagaagttcaagccgccgaagaaccctgccgagtaccgtgcgatgctggagcgagcgatcgccaacatagacaaagagcgagagaacgcgccgacgactcttgccgaggcccatgcgaggctggagcagatgttgtctcccgggacactggctgagattgacgctatgccgtccgaagaaggcatgatcgagtattacatgggtctgggggcgcacatccgcagtggttgggggttggggagcgatttgcccccggcgaagcctcctgcgtaggcaggggcttcgccgggggctatgctatcacatcttaccgattacacgatggcctacttcaagacccttatgcactcttcctacgaagtttcacgcctgccacgctcaggcccagcatccccagcaaaacggcaccggggaccgggaccatctgtaaaccacggacggtcgagatgtagttgccagagagaccgccatccaagtaccacgctgaacctgaatatgaaaggccatacttcctcaaagaatcaggatacccaccagccgagttgttcttgtcatcgtcagagtcggttacgtagatggcagtgtagtaatctgcactgatagggtcatactcaaagccccaggctgtaatcgcgtgcgccatggttcctcggattgaaagaccaatcccgtaaccatcgtgcatccaatcgtcaatatttgaaagtgccgctgaatccgtgccgtccactctcgtgtaatcatcgtgattgagtgtcggatagaatccacctccgccatcaacatcctcctgggcccaaccattcgtagcatgaactgcaccttgcatatcattggttccatcaaaccaccagttccaaccaacgttggcattgccacctgcatctgtgaaatgtgctccgaaatgagcgaacatgtcgtcggtggtagtcattccacccacctggccccaacctgtgtactccaggatattggaggccgatgcagcccaacacaataagtcgtcatcttggtttacatcagtcttctcagcatcggcccaggtaccaccccaggtgtcccagatattatagatatctgcaaatgagctgctggcgagcagtgccacgatccccacagcaacaaatgaaactgcgaacctgtttttcatcaaaatcctccgtttccatgtctccatgtatttgacttaatggagaccttcaattcgttgatggcccgcacgcgggagagcatttcttggctattacaggaccggagggccgcgcgctgccagtacggctggtgcgaattgggatgtccggcaaagtgacgcagtgtcatccaggcgagatggtgcaagagaatcccccaccctggaatccggctgaacgaagcagcgtactggtacagagcagagaatttccggcgacacagcaagattggggccgatctggaaaggaccggcgttgtggtaccattccgggacagagcccagggatgatctccggacccagtggccagagcgacacagtcccaggccgagaagggcgtacagacaataatccagactgcctgatctctccgttaggtctgggccatgttgcgtggctcggcccgttccaccctctgcttccgtttcgggcaaaggaacgatggggcttgagttcagatctgaaagattgaaaggacaagcgaacaaactgtacgaatttgctcctcgaagctgcgcttgctcgcagactcgcgaaacccgtcctctgccagcatccaatgggcagacgggcatcaggtcggcaaagacaccctctgtagcgatcagagccgccgcaaccgcaatgatgaccctactcctgtccgtcatcgacccttgctccgcacccccgcttcttttgctaggccacctagactgcctatatgtcccagtgtaccgtgactcgtcgttcgattccaagaaaaacgcaccaaatcacggtctttccctgttttcgctttctgtatgtctgtaggctatgtcctaaatatgcttggggagctatgtgtggagaggtctcgacaatccggccaactgacccaacgccgcgatcggcggcgcgtgacaggtctctggccgcggtctgcgctggcgatgctgtccagagtgacgatatcggcgataacgaggagacctggaccgagatgaccgtcgagggcgtaggcaaggggactaatggcgggatcgatggtcgtgacatggcagttgaataggtagctgtccgaatggtggtccgtaaagggagttatagataggaactccccggatggacaagggcatgcatataagttgccgcatatgacccttgccgcgagagacaacaagaagtgcctttagaggtgatgttgtcaatcagagcacggagcctccaatcttcacgaaggaaggtggcatgcggctcggacggatcgccattcgttggcgtctctattatccgcctcaccagcgcgggtgggcccaccggcgatacgtgtggtagagggaacaccgagcaaggagatgatcgtgaattcgaggagcaaaggggtttccaggattgtgatcgtcgtcgtgattctgttggccgctgtcggtttgttgcccggtcttttcgttgttcgtactggcatggtagaacatagaagtgcccgccagagactcgtacgattgctcagtgagaccgattaccaaacggtcctggaagcgtgcagggagctgtcgatgcgtgtcgcccgaggacatctcaagcctggcggttatggtgtccggttgaatgtggccccggaggctccggatttccctcaagtgattttggccctagagccggcatgcgtcctgatagaaaatgatggtcgtgtcttcgtcgagatgcttggctatcccagctacggcgtagtcgcctaccctgagggctacagggtcggtccttatggcttgggggacgtggagcttatacccggattgtggtattatcatgaggactacgataagtatgtggattacaggaaggacgtcaactccttggtggaacgaggaagggcataccagtggcggaccctggttgattgcagcccattcacgttaaagtgcttacaggctctcggctgcgggctgcggtttggtcggctgatatgtggactctcaacgcgcgaggttcatggttgatgtgcgccggcagacctgctcgtttggaaggtgtcacgagacgggccccgaagcggcttgtggatgatggcggggcattgcataggggagtgatcctatgattcggtgggcggggcccaccctgcgcgactgagttcgtccccaggtgaggtgttaagagtctcgtaggagttgctgtcatgggcaaggtcacgaaatcacgtcgggaccgcatcattgtcgttgccgtggtggcagcggttgctgctattctcgctcccttcgcggtcaatttcttcgggattctgcgagtgtttcacggtgtacaagagagcagagtccgattgctggataaaaccgatcatgtcgccttgctggacgcctgtcaggaactctcacgacaggttgccgccggagagttggctccaggccggtacgagagacatggcgagcagtgggagccggcgttcgaaccgccagaggtcatccgtgagcttcgacctccgctcctcagaatcgacccggatgggcgtgtggtggtgagcatggccgcaggactaagccaattcggcgcgaccgcataccccgatgggtaccgagaaggctcagcgagcttccactatggtgaccgagaactcatcccgaacctatggtactttgacatggagtaccagagggagccggattacgacaagattgtcgacggaatccttcgccggcacggaggccaatcgggagcggattagcgttgcgagggaattgaaggcctgcggtctctcccgaagaggaaagaacacctgacatctttgaattcccagtggaactgcctgccctggacgagggcgaccccatcgtctggtgagccggcgcggcttgaggattggacaagacggtcgcaggcgcctattgaaaggggtagtattgctgccggatcgatggctggttccatcaatctcttgttgacacggacttggtctctctgctagcgttgcatcaatgaggtgtgttgttccgtatgtgaatacgccatggtgtcgaagatagacagcccgatgtcgctccaggaagccgaggggtgggctgttcattgagtcgcatagccagcagttactgtgaagatctggtccaataggagacaagatcatggcgacttcggccctgacaggcgcgcgggaaatcgtagattggctcaggcacaccgaggaacggatcgggcagttgtatgcggcggcggccaaagtttgttgccacgacgcggcgctgtccagtttcctcggtcagttggcggaggacgagaagtcgcacgccgagttcatgacgcgggtgtgggagcattttcgcagcaccaaggaggctccggtactccgcgttgttcttgacagtgacactcaaaggcagatcgaggaactcttcgagcgatttcagaggctgttaatcaaagcggaaatccccaagcaacgcatcatggagtacgtcgcccgggccgagtcctccgaactgaatcccgtgttcctctacgtggccgacgagtatcggcgggcgggtcgtgaaggcgaacacatgaccggcgagattcaagggcatctgctgcgcatccagaagttcattgagaacctgcccaaggaccagagaccttctattgatgtttgcaccctgccttctgtgggtgagccgcgcttcctggtggttgacgatcatggacctttgcgccggctgatggcgtctctgctttctcgccgtggaatggtcgatacggcccaagggggccaagaaggattggaacggctgaaagagcattttcacgatggtgttgtctccgatatccggatgtcgggaatggatggattcgagttctaccagcgtgccgtgcaatacgacggtagactggatcgacggttcctcttctgctcaagtgacgtgacctctgagaccgagggccacctccgcgagaggaacctgccgtttctgaagaagccttttgggttgcacgatttccatggggccatcgagaagattctgagcagcacggatgtcgttcccggaagaccgacggaatagaagcgtccggcgcatcacagatctggaagtcggccattttcctcgcgcaatcttatatcactgaaagccgcatctctatatgccctgttgttggcgccttcgttcagagaaaccctcaaggcgtatcggcacggcgtgggcgcggggacgcctcaaccaggccggacggcgtccggggggtggacagcagtgtgtgaaacagcttccagcgtttggcggggtcggtcgcgccgccgtggcgttcgatgtagtctttgacgagccgccgaccgacggtgtagttgatgatatagctgcgatgctgttcgatgaactgcatcaggcccatctcggcgcccggggctatcagggagtaacgccgcagccactgcttggtctgggcagcatccatcttgccgtcgagatagcgccgcgccgcctcgacaaccgccccgtccaattcgctcttgagttgcatgatcctgtcgtaggtttcggcctgggccggatcgatgtccagcaacgggaacagtaccgaccgttcgaattccaatcgctccttattgccgagcaggtcgtaactgccatattcggccagtccctctgcgacgagcgccaggggactgtaaagagggaggatcgaaaactcaatccaacgcctgcccttgaccaggtgcttatcgagcagggtcagatgcgtgtggtggcccggatacatctcatgtcgggcgatgcgaacgatatcggcgatgcagaacggcgcactggagttgacctggatcagactgacgccatcgccttgataggtcaccgaggcggcccagggcttgccaaaaacgaactccatctcgaaccgctcgtcggcaggcagcgtgacatgctcccgcgtgggttgccgataggcggcgatcgcgcctttcagcgccttctcgatctcgatgcgcggcatggtgaattcgatccggtactggttgaagcgccagtagagttcgccttcgccgggcaggagtctgtcgagttcgtccagaatgccctggtagtgtgtgggctcccaggccggcgcgacggcgtcgaacagggcccgagactcttcgtcgaaggacattctgacgttcgccagcaggtcgatcttgcctcggacgctgcgcaattgcttatcgatatagtcccgccggagtttttcaatgccttcgactccgtcactgtccatcccctccagttgcctgatgagcgcatcggctccgccccgcaaccgggcgccggggaattcgccctgcatcacgtcgtcggcaggttgccacgcagacgggccgaagtaggcgtcgacatagccgtcgtcatacagtcccacctccagcacaagcttaacatatccctctgcgacatcgttgacgtcagcctggccggctgtcgcgacagtcccatccgccagtagccagagcgccagcagaaaacagcggtgaatcctcattctctcgttcctctcatcctgcgcggtgttccagcatggcgccgatgccgaccaggggagggcggtgttggcgtgccaatgcccgctcgattcctcacgatgtcatttgccttggattctcttggtaaatcggaaggccggccggtgtggcctgaaaaaaagtgaaaagatacggaaaatcccttcccggagggtcccggtggacgtacaataaggagtgaatgatcactccggtcgaaagggctggtattgtggctaggagcaatagtctttcagagaagaagatcgccattctcgaggcgacactggtgttgattgccgaacaaggcttccacggggcgccaacttcggaaatcgccgagaaagccggtgtggggatgggatctctctatcggtactttgaagataaggatgaactgatccgagagctgttcgtgtacgttacggagcagtcgcgacgggccatcgttaaggggcatgaccctgaggcgcccttcagggaacagtatatacacctttgccgcaatgcgctgcggcatatggcgagccatcctgacatctttcgctttgttgaacagtacctgaattcgccctacggtgttggcgagcgacgtgagaagcttctgggcctgggcagcgtcagcgtgacggatgggccgctggaggaactgtttcggctggccagggcccgtcaagtgacgaaggacattccgctaccggctgtctatgccctgacgttcgggccgctgttcttcctgattcgcgacgtgcacgccgggctgattgaggtggatgatgagatggtggaacagaccgtggaggcctgctgggatgccgtaagacgctgaccagcggccggaatgtagggtttctatgggagaccctgtttttttgccgcctgtcggagggagggctcactccggaaggcggaaacgccgggccgcaaagaagccggcctaggggaatagagatatgctgcactacaaggatcgcgagcgtaaagtcgacattgttactatggaccgtgtgctggctaccgatgtctacgagaggttgcgcgcgtacaagccaatggaatcggttgaagtggttcgcccgggtcgcgggggcgacgagattacggtgcaggatgtcgaacagttcgttcctgataccacgcgggccgccgtcttgatcatcgacgttcgctatcagacacgagcgaagctcaggaacgcttatggcaccatggttcggcggagtcgtcccgatttccatacctattgccataccgtcgtcatcggtgggggaccgttcaatgtgtttcggccgggtatggccattgaggcgtttcgcaactacctgctcgagatgcgaatcgattacagcccggcggtgtgtttcgtcgacccgttccttcattatactttcgacgagatgcaggagcgggcgctgtacgaaaacaatacgctgccggatcggataccgaaaaatctgcagaagcacttcaaggcgaacaaactgggggccgagcaactgcgggcctatttccgcgccgcggacgtctctgagaccgggagggaggggcggagacgcaagaggcagaagatgctggaaggactgtatcgccggttagtgcataaggacttccccgaccacgaggaggagttggtgcagaccttggccaaggaggggtgtccactgctgggcgaaacgctcgcgttcaatatctatcccttctttttcgccgagtgggtgatggatttggtgcgtaaggttgatgcgaccaggtctggggggcaggccctgcgaagggactgtcgcgtgccgggcgccaagagcgcgtgaggatgttgatacgcaggttgccatacatatttgactgggaatcgtcatgagagtcctaatgcttttatatatcgtgtcctcctcgctgtgccttgagcccgcagttctgaggcgcgcggcgcagcgttgaccggcggtgacgggtactggtgccttcggtcaaggcagtgacgccccgggtgccgatcagtgaagtccttgtcagtactcccatgcttcagaagctgatcgtcgagcagtgtgacagcgatctgcctgtggtgattcgcggcggtcgatggtggcgcggatgccggccaggggcaaggcggcgctggccaggtagccgggcagttggcgtttggtgccgaagatccactcgcagacgtcgccgctttggaagtcacgcaccatgtcgatcacggtttggtcggccagggcgggatcgaccagatcgagcgtgtagacgaaccatccggtgggtgtggcccagtaggcgccgttctggtaggtgtcgcgaccacaggatggtttttcccagtagagaccgccgggcaggtgtcggatctggccggcctggacgatttgtgcgtagtgctgctggaaataggtggcgacggcttttgattgcttgctgtcggcgacgcccagatagactgcaaaggctgagccccagatgtcatgctctcggcactggacggtcgcggcgcggaagagcccggtatcgcggtcccagaaggttttgcgaatgctctgcacgacacgttggctctccgcctgccacttcctcgcgtcgtggtcgcggccgagcgttccaaacaggtccgccagttgtcgagacgcctgcacgtacagcagcgagcagaacaggacctggccctgcttgccgatcgtgtcggtgaagccatagggacatcgctcctggggttcgcctggtttgatacagacgagccccgtatcgggacggcggggaaccgcgttcattgtcttgaccagcggcgcgatgatctctgcgagcaaatcggcgtcctgggtctggcgataggtgtgccaggcgaccgagacggtgaactgtgagccatcggcgaccggatgcgtgcccatcgaaccgaaacccggcttatagatgggcgcgccgtcgaacttgacgcagtcggtgccggcgccgtcggcccgcatcttgcgtacgaagagtcggcacgcgtcggtcagttccttgtcggaatacgcatcgatggcgccttccagcgtatattcgtagtcgcgcagccagaaggcttcgtacccgagcccgacctggggcgggaaggccgcagtgccgtcggccattgtgcgcttcgaggctcggacgagacggtgcgcctcgctctccagccatgtcacggcttcggtgagcgtctcgggaccggtctcggtcgcccgaacggttcccatcgggacaagggcgacgacaagcaacactccaagaaaccatcttcgcatacgaatctctccttgggaactgttggactactcccagaccagacgggcgagactgacgccgcgcttgggccactggacgctggagatgtaccagtcgccatcttcgccctggaacacttcaggggcgtgggcgtccagacgggtgacgagtttgtcggtgtcgaacgaatagggatcgtcggattgatagacgtaggtgacatgctgataggcgccgttcagctcttttttgtcccagtggccgtcccagccgcagacgaagaggtagaacgtgtcattgtagcgaacgatcgagggcgactcggtgtctacgttgtccttcttcttgaggatgcagcgcgtctgcgtgcaggtcacaagatcgtcggattgcgccataagcacttcgtatcggccgcacaccatgatgtgccaggccccttgccagaagatgacactgggatcgcgtccggccggggcgttcgtcaccgggcccttgggagtccattggtgcaggtccttcgaggttgcatagcgcagcggggcgggcccgtagatcatgtgatagagcccgtccttccggatgatgtagggcgcgtggttcgcttcgatctcgcccggacgctcggcgggggggagcaccttgggcaggtccttccatgcgccctcacgcaggacgtccttcaagttacccttcggcgcctgggcatgaaacgacaggttttctcccgcgtggatctgatcgaacggggtacgcgggtgtgtaatgccgaacgcatgccagcgtccgttcgggcctttgacgaagcagtggtcgttgggcacccattcggggtagtactgccccgccttcaggcccgcgacgtcggggcccggaaagacatcgccggccggctggtagatgtggacgtagggcccatcaatcctcgggatacgtaccttggcgctggttgctccgcgctgcccaagggtggtccggtgatgggacgtggcctggacgatcttctcatgtgactcgtagggccggtacatcgctcgcatgacgaaacggtaacgctggcccacctcgtagttggggatgaaccactggaagtcccaggccggattgccttggcctccccccgagggagactggctcagacgcacctgatcgcgcgggcgaaagatctgtgccagggtcatatcatgactgatgccataataccagggctcggtgtagcggtagcgcgagcgattgaacacgagggtcagtgggaagtttgggtcgtgcttgaatgtgcgactgtcgtcaagagccaggtgtgtggcgcgcacgccatgggcgggtgtcacgccgcgtatccagcgacggctcgcggccggttcgtcggcgggtcgaccccaaaagtgaatgtccagggatttgggttggtggatgtagctggcgaagaacaggccgatgtagtcgttcgcaaaggttcgggcgtgggggacgcattcgagggtcatctcgatcgcaccgtcggggagcagttcgtaggtcagccagctttcgagtttccagtggggtgtaggcggttggtgcagcgccgcggtatggtcatcgacctgtctgatcgtcatcggagcgttgcgaggctcgaacagaatgttcctcggctggacggtcccatcgtggatgtgctcgaagttcaggccggcgtagaacgggacgaatagattgtcttttcgcttgcggtgggtcagcgaggcgacgccactgtatccgcggcgatggccggggagtgtttcgtcgtcgactgcctcgttgttgacgatcaccgccgttacatccccgcgctggagcacaacatacgtcttgtccgcagtcccggccgggagcgaactgcatgtcacaagcaacagcaatgcggcgaacgagaggggagcgtgcatcggaaagcgcatttcaaaccagtttctcattgggcgtcctccctattcctgggcctgacgagtacggggcgattatagcagagaaacttggagtaaggcaacgaatgcctggtggtttacgttcgagacggcggatgtaaggtttccttctccgtcgtctcccgagacgatcggctcgggagacgaacacgtgtgtattaaactgcgccttcggctctgctgggctcagtcgtcgattgcgttcggagtgggctcgactctcatgacgccgagataggtgaaatgataggagttgtcattgttggcggtgggggccaggctgatcgtgatctcaccggccgcgtccggctcgatccccgtggccgtcacgaagttgtcgacgttagcggcgacgtccagggccgcgaattctgcgttggcgccggtgagggtgtagcccgtttcgcggttgtcgcggatgcccatgcgtgaggcgtagaaggtgaagtcgtacgtcagcagcgggtccagccccgccagcttgaaactggggaagacatcgcttcggccgctgaaggtctccgtgttgccaaagagcgagtcgcgcgtggcgtcggtcgggaagagagcgaattccaacgtgccactctggttggcgccgttgaatcgactcagcatgaccaggtcgatttccgtcgttctgccatcgacggttgtcaggttgagcaactgacctgagtccgaagcgccgacgctctcggtgatattgttccatgtgttctccgtatcgctcgtcgtcggcgtactgcccgatccgaaatcgaagagaaggatttcgggctgcacctgtcccgaagctgtggcgcccgccgccagggcattgcccgccaggtcttgcacgccggtgacactgacgtcgaaggtggcggtcagacgctcgctcagcatcaggacaacggtttggccgtccgcatccagttcagcgctgatgacggcaaccgccccttcattgacggcgtagttgtcgatctgagtcacggtttcggggtcgagacgctcatcgaaagaaagctcgatcgtatatccgttggtgctggttgccgacagcaggaccggggcgttcacgtcgggcgccactgtcaggacggctgcgccgctggtggcgtcatagagcaggttgctgacgctgacggagaacgcggcgccgtccaggtcgggtgtcaccaggtcgatggtgtaggtaaacgcgttggcgtcggcgatagcctggccatcctggaaccactggacgacatacgggggcgtgctgtcgaccttcgcttggaacgctgccgagcgatactccagaaccctctggtcggccggttcctcgatgaacacgataggcgcctgctcggggatctcgtccatttgcatcgcgccgaggtagatgaaatggtatccgttgttgttattggccgtcggttcgaggctgatggtgatttcgccctgttcgtcgggcgtgaccccattggcgatggcgacgtcatcgacgttgttggctgggtcgagaacgacgtaaaccgaatcagcgccggagatagtgtagcctgtttcgcgcacgtcgttggccccgagacgggaggcgaagaacgtgaagttgtaggtcaatgtcgggtccaggccggtcagcttgaagctgggcgccacgtcgctgaaaccgttccagtttggtgtattgccataaagcgaatcgctggtggcgttggatgcgaattgggtcgattcggtggttccactctgattggggccactcccgttgaacgggctgagcatctgaaggccgatctctgtggacgtgttctccgtgtcgaccaggccgagcaactgaccggtctctgcgccgccaatatccaggatgacgttgttccagaagtgggcaggatcgtccggggtcgggccgttctgggtgatggtgttgacggcgccgaaatcgaaaaggaagctccgcgctcccggcgacgcccaggcggccagtacgggagcgaagaccgattgccacagttcgtagccggcggcattcatatgccgcatgtcactgccgaacagttcggggcgcggctgaccgctgtcgttcagcatgggcgtcaatacatcgatgaaccagaggtgtggatcgttggcggccagttgctccagacgttcgttgagttgcctggtgacttccaggtactggctccggctggggctgggtttcgtcgcgatgaagcccacatcggcgccgggcaagtgctcctcgaccagtgccaggaattcgagagtgtcgtcgtagactacgtccaccgacttgccgccggccaggtcgttgtcgccttcgtagacgaggatcagggccggatcgtaaggcgcgacgatgcgatcgaagtagtagagcaggtcgctcatgtgcgagccgccaaagccacgattcatagcgggatagtcggcgaagtcgcccggcaggtcgggccagacgcggatgctggaggagcccacgaacagaacggggtcggccggcggggggctggccagatccgcctgctcgaacgcgcggatgtcgttctcaaaacgcgtcgggtcctgggcctgggcatcgagaaggggcatcagagcaaaggctaacgcaagccagctgaggaagaaggggcgaaggccaggtgtcttaagcgattgagtgacggtgaagtccgtgctctcgttcataccctgcatctcctctttctaccccgagccctgttggggctccgactcttccccctcgaccctcctcgtgccatccgcggagaaggctaacgatgtatgcctcatcataccacaatcgccaggcaaccctcaacacctctgtccctcaattcgccgactactgctattccgacgggaactcagacgtcacggtgtcatgaccttgagtttcttgatcgggccgaagagggcggggccgtcttttttgggggtttttacggagattgtgaattggccggcctggttcttgcgcaccgataggttcctggtgcgatactggcccttctcgtagttgaaggtcttgccatcgtcttcgtagagggcgaaacggccctcggtcttgccatagaaacgcacttccagggggtgaccataggcctcttcggtctggttaaccgcttcggtgagcatcgggaccacggcgccttccttggcgaacagcggcatacggtcgcccaggtccttggcggtgacggtgatcgtcttgttgttgccgacgaacttgcctgtgtagaagtcgtaccagttgccggccggcagttggacttggcgcttgatcgcctggcgttcgtagaacggcgcgaccataatggagggaccgaacatgaactggtcggtcttttcgatgatcttgcccatcgcgtaggggttggtctcgctgtcgagcttgccctcgatgacattgccggccagttcgccaaacccgtcttccagaatcatggcgcggatgggcgggatgcccttgaagtgatagtcggcgaacgcgctgtagaggtagggcaagaagcgcatgcgcagcttgatcacgtcacgcaccgaatcggtgacatcgccatagctccagggcttcttgccggacgaccatgcgttgagctgggccatgggcgagaagcagacggtctgcatgcggttgagccattcgcgaccgttaccggccgagcgggcttcgggggtccacaggaggccacccaggctggcggtggacaggcccgtgatgtattcggcatggccataggaatcgctgtagatgacgaacgggtagcccgaggcggcgccgttgctggcgcggaccagaccataggtgcggacgttacgcttcctgaacagatcgttgtagagcatgttctgcatgagcaggccgtaggattggcgcatcgcttcgcccgagatgcccgatgggaacgtcgcgtggtccggccagagccagaaatcgtagccgtccacctcatcgattttgtacccactgatgccaatgcgaatgtggtcctcgtgatgctgatcggtgagcaacttgcgggccttgggtagggtgtagtccgggacgatgcccagccagaccatgtgcgagccggagagcggatacatctcgtcgtagatgcggctgtgcttggagatgtaagggttctcccagaggttcaggcgaatgccttggcccagcaattcctgggtgaacgcctcggggtcggggaagcgtttcttctgccactcgaacgtgcagggataggacttggtcatccagcccggctccagaccgatgacgtcgagcgggaagtctttttcgacgaactgcttcaactcgtcacgcgtctggtcggcgttgaaacgggcgtggacccggtgccagaatcccaatccccagagtgggggcagggcgccgccgccattgtagagattgtagcgactgacgacgtcgagcatcgagtcgcccgcgaagacgaccacctcgagccctgcgccgttgatttgcgcttcgacggcgtcacccggtggcatggccagccagggccccggctgcttctcgtccttgggcggattgcggtccacctcgggtgggttgtggcccgagtccttacggttgcccacctggttgtagatcttcaggaatcgagcggtattgaagaagacgccgtagcccttgctcgagatgtagaacggcacgggggcgtgggtgcgcccgccgcctttgttccagtggtccacgttcagggtcaggatcttgcgggacttcttgatcccgtcaaattgcaggccgaagccatagagcttctcgtcggcgtcggtggggatgcggatcatgaccttgccatccggcgtgacgagataggtggtttcgcccggcgcgaacgggaactcgggtttggatagctggttcagcctttcgagtctcgggccggctgcggccaggtccgtgtagcgcaactcaccgtccatctggcccagttcggccttccagatccccggtgcgacgttctgccagggcttgacaggcgtcagatcgctcagacccgccgcatggcatggagcaaagagaaccatcagtacgatcgcgatgagaacggcgcggagcattaaacgagtcctgaccatcggtattcctttcttcgatcggggtcttctcaggcccacattcgcggcgccttggcatacagcgttccccaccataccacactatgcggctgatttccacggcttccaagggttgctttgtcggttgccgggcggctagaacgcgtgcgagagggacaggccgatgttgtagattctctggtggtaatcgatgtcgttcacctcgcggtcgccccaggcgtggcccagcaccaggtccaagaaccagtcgttgcaccattcgtagccgacgcccagcgtgaggttgtggcggtcgacgcccacgatgttcgagaggctgacggacttgtcgggcaggggggattcgtcgaagaaatagccggcgcgaaaggcccagcgcagggcgggcttccattcgagacccaggcggtagcgatcggagtcgcgccagtcggaggagtagtcctgattggccagcgccacgccgggcgtgtcgtactcgatgtcgatatcgaaggtggaccagtcggtacgctgccagtcggcggtgaacgtcaggttggtcgtgtgccgataggcggttcctaggccgtaggtggcggggtggcggaacttctgtacgaagccgctggattcggatagaccgagcagcgtcaggctggcgcgggcgtgtccatctagatcgatgacgccaccggtgcgatagacgccgcccaggctcagcttcttgttgatgtgatagagtccgccgaagatgccctcgaagcccgttccgtcggagcctgtgtcgagggcgtagctgtagtcgctgatgcccgaatcggcgacggtcttgttggcttcgtattcgacgtcgccatagaggacgtccaggccggcgcccagggccagggcgtcgttgatctgccgggccagggagaaattgatggcgatcacgctgagttgctggaagagttcggcggtgatggtgccgccgccataggggacgcggtcgtcccagtcgacgtagtagccggcggggatgtagtagccggcggccatgttgaagccggcgtaggaccagtagcctccggcgccggctgggatgtagaagtcgtagttgaccttctccttgctgaagcgcgtgggctccatctccggcgcatactggacgaagatgtcacgctgaaagcgcgggtccattccggccaccggcggattggcgatactattctcatcgcgcatctcgatatggggactgctgaagtcgaagcccgcgccggcgccgcgcagttgggtcaggcccgccgggttccagtagatcgccgtccagtcgtcggccaggccgatgaaggcgccgcccatcgattgggcgcgactgccgaggccgccccattcgtagccgcccgctccggcagggtgggtcagagcaaccgtgagcgtgaggatggcgacggtcagaaggcgcctcttgcgttggtgggcgaaggtcatcaaagcggttcctttccattgtctttggggatcgatgtgtcttgttccggcgcgtccagcacggcccccggttcccagagtttaaggattgccacgcaggctggcaagacaaagacgtcgcccatccaggcagcgatcatggcgaccgcggtgaacaggccgaagtactggatcggcttgaagtccgccagcaggaggacgacgaagccggcggcggtgacgatcgaggtatacgtgatggccgggccggccttctggaggctgttccgcacggccgtaacggtcgccaggctgtgccgcttctcatcctgatagtgagccaggaaatgcaccgtgtcgtcggcggcgatgccgatcgcgatgctggcgatcatcaccgtggcggtatcgaacggaatgcccagcagcgtcatcaccgcgaagacggagaagatgggcaacaggttgggcaggatcgcggcgacgagagctcgccaggagcggaaaaagacgccgatgatgacgaggatcagaccgccggccagcgcaaaactgcggatctgcgtttcgatcagcgactgctgggcggctttgctcagcggcgcgatgccggtgacatagtgcgtcgccggcgctgggatcagggcgctggcttcctcttcaatgaagtccagcagtcggtagtactcgctgttggcagtgcgccggatgaagacggacagccgtagcgagatctgctcgtcggcgcggtgaacgtaggcatgcagcatgggcttgagcggattctttcgcgccgccagcgaaggcaggaagacggggatcgggacattcttgaagcacgaggcgatagtgcggtagtgcatgaccttggccacctccggtcgcgtggcgattcggttgcccaactcctccagtgtcttgagcatcgtgctgccttgctcggcggcggtcgtgacgcttatctcggccgtgtacatcccggtcaggtgcgcgccgatgaattcatagtcgcgccgcagtgtcgaatcgatggggaagaactgcaccacgttggattcgacgcgggcccgagcggtcaatccgaccgataccaggaagaccagcagtgccagcgccaatccggggcctcggtgtcggcatacgaattcgccgaccgccgccgtccagtggggtcgggccagttggggaagacctgggccgcggtgcagcaggcagagcatccccggcacgatggtcatgttgaatacgaacgacaggaggatgccgatcccggtgaagatcccgaactcgacgacgggttgcatctcggaaatcgccaaggcggcgaaccctaacgcggtcgtcacgttggagaggaatacgggccgcatcacttcggtcagcgccctccgcgccgtctccgtcggacccgtttcgtcggagaggtgggccaggaagcgggaggtgacgtgaatccctccggacagtgacagcatgaatagcagcgatggcatgaccaccgtgatcatattcagcgtcctgccggaggcgaccagaatccccatggcccagagggtcgtgacgcctaccgcgctgagaacggcgatgacgggcgagatgcccctcagcgtcacggccaggatgagcacggagagcaggatcgctacgggcagaaagcgttgtgatgtccgcgtcgagccgcgatccagggccacgttcagcaggggggcgccggccatgtggatcggcggaccgccaccggtcgccaccgccgcctcgatcccctcgatcacggctgtgcgggaggcggcaccgtcgacttccttgaggtagacgatcatgccgaaggtgcgtccgtcggcgccgatcaggaagttgcggaacaacgtgttctgacggatcagatccgcccagtcggagcggaagtcggccagaatctcggccgcggtggcgagggtgaatacgttgtcgacgttatcgatctgtcgcaaccgctcggccaggtccttctgaaaggccaggcaatcctcagacaggggatcgtcggcctccccggccaggacgacgaattcctcgttgccatatttgttcaggaagtcacgatagtcctgtcgcgcctggttccgctcgcccagccagacttcggtggcgttatcgattcgcgcgtcacgcagcagatagagggggacaaccgcgctgagcaggcagaccaaggccagccagcggcagtgggccgctacgaacccggacagcttgtcgtcggttttgtacattgtgggcagcaccgtatccagttatctgcagcacgagaccttagcaaagatcctccccagtgcaagcgcaaactgtcgcgaccgcgcggcgccatcggcaagaagcgcaagacggtaaaatgctgaatcatggacgccggctcagtgtgcatcgctcagaactggggatgcgtgctttcgtaaacgccgggtgagccgccgagggtggtgctggggcgccaggccgtttgattgcccagggcgttgggatcgagcgggggaggatcgatgaggaccagggagaatccctcgccatcagtggagcggcgccacttatcgtcgtagcggaaatcgacgatggtccggccgatggcgtcttcgagccgaagccgttcgcccccattgtcgagcttgccggcgtattggcctgcgatgttgatcgcgtcgccatagaacgaatgaaaggcgttcgggtcttgtacgacgatgaccgcttcgccaggcgcaagctccgtcgggccgaatacgaagtcgatcccggttgtgaaacgcacgaggttcagatcgatggttacgtctcccaggttcgctacttcgatgaactcggcatcgggctcgactcccgtcgcgacatcgtcggcagggtgatacatgatctccgtgatgcgcaggttctctacgacgggcccgacggcgaacgtcgcctcgttcagggcgctccaggttgcggcgctgagcgtgcgggccttgacctgggcggtgcggtccagcacgatcgggccggcgtaggcctgcgccgttgtcgcgacgtcggccggggcgccgccgatggcggcggtcagttcggcgccgatcaggaaatcggaactgccggccgagacgttcagcgcgtggatggcgagcagattgaggtccgagcgcagtaggggcaaaaaggccgagacgtcgatatattccaggccgacggcgtcggcgtcggagtggcccgcctcggcgctggaattccaggcgggctcgccttcgaaattccgccgggcgatttccgtaccgttgagataggcgacgaagccgtcgtcgtagcggacgcccagggtcatcgcgtcccagtcgtccgcgagtgtctccggcgtgaaggatatgcggacatagcacgaggtgtggctgccgtacatgagatcgtgcacgtcggcgctgatataaccttcatagcccgtggtgttttcgtagccgatcccgccgggcgtcccctcgacggcggtccagtccgccaggtcgtggcgcaatacctgccgccatgggtctccgatgtcctccgtcgggaccagcatatgcttgagcgcctcttcgccgacgagcgtgaactcggcggcctcgctctgcggcggcgcgggccggcgcgggtcggcgccatcggtggtgaaccaggtcacgccggtcggggtggtcatctccagggcgaatcccgtcgggaccgcgccgccgtgccggctgaatgccggggccgcgacgctgggatagaggccccgcccgcgcagttggttcagcacaatgtcgctgcgtcgggggaaatactcctgggtcaggaaatcaagttccgcctgccactcgatatccggcgtataggggtcgtcgggttgatgggcgtcgccccagcgggcggactcggccaccaaggccaggcgaatctcttcggcgcggtcgagccagcgggccaccgcgttttggggggtgagcaacccgccattgaagaagtggcggtgcacgcggtcggcgaactgcatccggtagtcggcgttggcggtcagtcgctggtggacgtgtgtgggctggttgttgttgtccttgccggtgacattgtcgttgaggttcaggaacgtccgctccgaatcccaggagaggaagtggaacccgtcgccgccggtgcgccggcgtccgccataccagttgttgtggtcccagtccacgttgcccgcgtagaagtggacgagcaggtagtcgatcaggttggggatgtccaggtactcctgaatctcgtggtaggcgtcggccgaggccaggccgcgatcggcgatcgccatcatggcgttccaggcgttgcggttgccgtcgacggtgccgcctttatgctgcacgacgtcgtactcttcttcgacaccgccgaggtgctcggcgaagaaggcggcgttcggccgctcgatcgcgtggtagaggccccagtacagaccgttgagatagaggtggacatagcattggcccgcactgagccggcccatcgcgcgctgcgtgtcacggggccattggtcgcgaatgtattgggcccgaatctgctggttggtgttggggtggaaccaggagtcgccgttgccgccgcgcaggacgatcgtatcgaaccgctgaatgggccagtcctcgaagagcgggaactccagtttggttgggccgtattggcccttgaacagcaggcggaggttgtgcttaggtcggttcgggttgcggctggccccgccctggatgcgcagggccgcattgacctgaatctccgcgccgccggccgggtcgatgatctccattgagaccggccgctcccagtcttcgccttcgctctgcgaattgacgtagatgccggtctccgggtcgaacaggtcgtcgacgtccagcgtcagcgagatcgttcggtgggtcagcagggcgacgccgacggtgtcccgatatggcggatacctgacgatggtcgggtccatttcgtaatccgctgcgccaccgcgccaggtgggcggaaagccttccgggttggggcgctgctgggtcacctggtcggcgaagatataggtgtgcgtccgcgtggtcgagggcttccagtccgagcggatcgccttggccttcagacaggtggtttcgtcgatctcgatcggtttggtatagcgtgtgccgcgataggcgcggcccgtccatacgtaaggttcacttccatcggtggtgtagtagatcgttgtctcgggcgtcgccgtcgtgagcgtcacgagcacgggcgcctcatagaagccccgctcgggactgaactgtacatcgtcgacgaatccctcgtagatcttgacgttggcgccgcccggcgtgggttgggacatgctgtgccaggcgtcggcgccgtcggggtagcggccgaacgagatgtccgaggcctgctcgccaaacgtcactgtgtcgatcggtgtcgcgccgtcgatgtcgagaaggacgatgtcctcgccccgagcgctgagactgaagggggcgtgcagacctggttcgtcttcggtatccccatcggcccagatgagcagaaagccctgggccggaaccgtcgtttcagcggaccggtcggcggggatgcgccacttgcctggttcgtccgggtcgtcgcttagatacatgcccgccatgtcgattggtattcgacttgtgttgtagatttcgatccagtcgtcgtattcggattgggggtcggctatcgtgctgctgttggccgccatgcactcgttgatccgcaaagggctatcgatggcgtgaaccgccgacgccaggcatgccatggcaagacacgctctaaggagccaccaccaacctctcaaacgactgggcattgcatgtttccatgtctaaccgcgttttggaccgataccgccggatgccgaccccgtcgggattgccacgtccccaattgtagcaaaagagaccctcccggggcaaacattgcttcatacgatcggcatgtgtgctatggcgccgcctgcggatcgggctcctccaactcccaccagagccgggggtagtcggcccctcatcgatccaccggatctcttcgcttccgtcatcttctgatctcctcgtcccaatgccgtccaccggcagattaccggccctcgtcgtgtctctcgagcgaaggtgctgacagggaaatactcgttccgcgtaggtttcagtataccggatcgggactgttcaggtcaaccttggtttgtgcgggttgtgggagggctttgcggggggatgctcgtcatccgcggaagtgcttggcgatgtagcggcgcacggggcattggcagatagttgttcgtccgaacgccatgccatggcgacagctccacccatcctcatcctggcagaacagcacctgttcaccggcggcccatttgacttctctgagcttctccagggccgattggagacactcgtgtcccctgtcgcagggcgtattgcggacgagttcctccagcttttcgcggtcctctcgggtcaaatccaccgtgaagttctccagtcgtcgtgccattgtatctggtgatattgtgtcagttgtaccggtccggctccgtgcgtgttcgtggattctcagaattccgcaaggtctcgacagcgcgggcgggactggtgacagaggccatggacgcggcttcgataacacctataatggcatgggtctctccttcgtgctgagagggatctgctagacgatggctttttcggagatacgcgctcatgcggcatacatcactgccgaccgacacggttcgattgggaagaatgtccagatggatactggtcttagtctggctggggcttgcggcagtggttcgaccgggttggtcgagcccggcccaatggcctcggacgcgggccgagcggaccggataccgggagacatcctcccatgccgacgtggtggcgtttctggagcagcttcgtgcggccggcgcgccgatctccgtgagcacgatgggcgccagcgatggggggcgatcgattcccctggtcgtggccacgcgacctctgacgactgacccggtgcaggcggcgcgggactgcaagcccgtggtgtacgtgcagggcaatatccatgccggcgaggtcgaaggcaaagaagccatgctgatgttgctgcgcgatctggcgcaggagccggccgggcggggactgctggacaagctcgtcttgctgacggcgccgatctacaatatcgatggaaacgaggacctcaagccccaggcggagcaccgctcgcaacagtttgggccggagagggtcggccggcgttctaacggcgcagggctcgatctcaatcgcgactatatcaaactcatggcccccgagacaaggggcgccatggagcatgtgttcatcaagtgggacccggacgtatttctcgatctgcacgccacgaacggaacgctgcatgggtatcagttgacctacgcgccgcctctgaatcccaatacggagccctcgattctggaatacacacgcgatcgactcttgcccggaattcgtggacgcctcaggcagcggtgggggatggagacctttgactatggcaatatcttcgtctacggccggcccaagccctcgaccgatcgtatcgcctggtacgcccatagtccggagtttcgtttcagcaccagctacgtcggtctgcgcaatcgcatcggcattctgtcggaggcgatgagtcacctgagctttcgcgaccgcgtagaggcgacgtaccgattcgtgcgggcgattctggagcaggtggcgcaggaggcttcgacggtcctggcgttaactgcccaggcggatcgtacggtcgtcggctgggggcgcgaccctgcccgtgcgccggcgctgggcgtgcgctttgccgcggcctcgcggggtcgggaggcggtcctgctggaggattatggcgatccgaaccggctgggccggcgtgacccggctcgaggccccggcccgcccgagaaggtctctgaaatcatgatgcctgtctacgaccgctttgtgacgaccgagacgtcacgatatccggccggttacgtcctggcgtccgacctgacggaggtggtatccctgttgcagcgtcacggcgtcgcagtcgagcgcatcgaaggtgactgggaaaccgaggcggagaccttcatggttgaaaccgtcaagacccggccccggtcttaccaagggcgccaattgtgcgaagtgcagggccacttccagagcgagcgccttgccgtacgggtgggcagcttctgggtttcgaccgcccagcctctggggatactgattttcagcctgttggagccggagagcatcgatggtgtcgcggtctggggattcctggccgatcatttgcaggaaggccgtcgctaccccatttggaagtgctaccagacgccgacgggccgcacccgatccttggattccgccgtagagtccgctggttgccctgagaggtgagtttttttcagaccatgattgcctttctggccccaattaggttatcatggccttgtggtgttctggggacacaagccggaactcctcgtgtgtggcgtctgagagcgtgtgtttgagaccaatgccaattggccaagcgagtggaaggggccctgaccatgaggaacagaagtgcattcacgctgatcgaactgctcgtcgttatcgccgtcatcgccgtcttgatggccatcctgatgccctccctgaagatcgcccgcgaacaggcgagggctatcaattgcatggccaaccagcggtcgctggcgcaggcgtacatcatgtacgccggcgacaatgatggtgcgatctgtggaggcatggctcgcccgagcgccacgaatagagtgccgccctgggtgaagccaccggggaacatcaacactgatggcagctttgccgccgtcgatggtgacgtgacattccagcagcggctcaacggcctgaaggccggggccatctatcctttcgtcaacgagcccgacgtgtatcattgcccgggtgacatgcgcaagaacatgggtacgagcctgggtgacgcacgggagtttctgatcttccgcagctattcgttgccggactacatgaccgggacaagcgccgccgatgcgaagaatctgtttagcttcaaggagcaggccaccaagatgctgttcgtcgaggagatctacgacggcgcctcgggcaatcacaatgtcgatggttggtcgtacaggccttacgacggtagcctgtgggatccgctgggcaacttccacagcgacgcctgtacgttcagcttcatggacggtcacgccgagcgcaagaaatggcaggacaagcgaactgtcatctactttggcagtcgcaccgacgcggccgcccagggctttggcaaggggagccagttcagcccgcccaacgtcgatctcgattggctcgacaagcactatccgggcaagaccctcaggaagggcgtcaactaacggtgccgccagacggcatcgtcatcgtcagggtccggatcgtaccgtcaggcgcatagtccgccgagttcagttcccttaggtggaccaatactcgcgcgggacgagaagcctattagcctcgccatttgccgattccattccagaattgttcgaccagccgggcattgccacgaagaacactgacgagatcgcatacagcacgcatacgatcctctcctcctgaacgatgaagatattgcccaatgtccctcatggctgcgttggccgtaggacaagagaaatcgtctctgcccgagagttccgaagaagcttcctcaccgagagcggctaaccgaaggccgagatagagattgattctctcaagatcaacctccaccaggtgtggtttcaagacatgaagtgcgtctgcgattttcgatttgtcgatatcttgataagacgaatgcatctgtttcgcaagcgcatcgacatcggcgtcttcccaagtccagttatggaggattaaccacgcgtgcgggtgccatgacagtatccacaggtcgacgtttgtaagaccagacagcgatccatagcgtctgagtatttctgtttcaatcaccacttgcgtggcattttttgactgaacagcggtttcgataaggtcaactgtcccctggatcgtttcttgcattctcttgcctctccatcggactctggctactctgagtgctcgtgaccctgttctctttaggaagctatgtaaggtgggtgctggagaccacttcaatcatccggacgccggcccggttatgaatggaatcgggtctgttcgtcggtttctcgaggcttctcaggacccgtcaccagggtactggcaggccgtgacatggtcaagggcgtgtcttgtcggagttggacgcggatcggaggcgggttctggggtcaggtccttctcgacgccacaacggtgcgcggggcagcctcatggagggtatttttcgcttgacattcggcgaaagtgtttgtattttagtaaacaaaaccaataagacatcaagctatgatacacaagcgtaaatactaactcccagtccgaaaggggagtcgtgattagtgaaacgcatgtctatgtcgagtgggcaaatcgggggacatccatgggcccggagccggcggttgcggcaccatcaattatgcaaaacaaacccaattgtgccctttaaagccagaaaacgagggtgaggcgaaaaaacaaagccaaacaaagccaatttgtgagacgcaatcgggggatgtgttcgcctttttgcggtagctcggtgggtcgacggccctgcaaaacgacgcggggagatgtcgcgccgggatgggatgaaaccgccgccgggaccggccttgacagaacggcctgtctccagggacaattggcactctttgtggcttcggttttcgtgattttccgatggcctggggcgtctatacttgtcgctgagtgaaatgttgcctatggacgagaagaagaatcagttcagtacgtttgccggtgtgttcacaccgtcgatcctgacgatcctcggcgtgatcatgttcctgcgcgccggttatgtgatcggccaggcgggcatcttcaacacgatcctgatcctgctggccgcccaggcgatcagtctgttgacggcgctgtccatgagcgctgtggcgaccaatactccggtggctggcgggggggcctactttctgatctcccggtcgctgggcccccagtttggcggggccatcggtctggcgctgttcctggcgcaggcgttgtccgtccccttctacattctgggcttcacgaacgccctggtgacagacgtccccagcctgggaccctggtttgggctcatcgcgctgggtacggcggtcgtgctctttgtcatcaactggatcagttcgggggcggccattcgctttcagtatgtggtcatgacgctcctggggttggccattttcgtctttctcggaggcgccctgaagcgtttcgatttcgcaacgtttcagacgaatctgggcccgcgttacacggggccggggatcggcttctgggtggtcttcgccatctacttccccgccgtcaccggcattctggccggggtgaatatgtcgggggatctcaaagatccggctcgctcgctggtccgcgggaccctggcggcgatcgtcgtggggttcttcatctatctgctggaagtcatcctttgcggcggctccaccgcacgcggcgatctggtcgagcgttcctattccatgctcaagatccacgccctctttggcgccggggtcctcgtcagcgggggagtgttcgccgccacgatctccagcgcggtcgggtcgttccttggggccccccgcgtgctgcaggccctggcgcgggacgggatatttcgcattctccacccgtttgcgcacggttcgaagggcacggacgagccgcgggccggtctggcgctgactctgggcttggcgctggtggttatcgtgctggtcagcggtcaggaatctatggccgctttcgacatgatcgctgcgattgtcagtatgttcttcctctgcacgtatggtatgatcaatctggccgccttcgtggagtcgttcggcgccaatccatcattccgaccgcgcttccgcttcttccattggacaacgtctctgctgggcttcgtcgcttgcctggttgccatggtgctgattgatgcgttggcggcctcaatcgcggtgctgaccgtcgccggcgtctatgtctttctgagccgtcgggttttccgggtggcgtttggagacgcccgtcggggctttcagtacgctctggtcgtgcgggctctgcagaaactccgtgacatgacgccgcatcccaagaactggcgtcccacgttcctggtcatggccgggaacacgaagacgcatctgactctgctgcgatacgccgtctggatggaagggggtcgcggcctcgtcaccgccggccaggtcatctcgggtgatctcgatacctttgcggcccgggtcgagagtctgcggtctgctatggacaagttcctcaagagcaatgagttggcggtgtttcccgaggtggtctttgccgaagacgtcgacgaggggattcgtatgttggcgcaagcacactcgatcggcccgctcaaacccaacaccgttgtgttcggctggccgcgcagcgccgaacgcgtcgaggcgatattccggcacgtctcgactatcgccgccctgggcaagagcgtggtggtggtggtggacaagggattgcccccgtccgtgcgtcgcgcgcggtgcgtcgatatctggtggagaggggagcaaaacggatcgcttatggcgacgctcgctcacctgctggtccagaactgggagtggggtcgtagccaggttcgggtcctgcgggtcatcggcgacgaggccggacgcgagtcgtcgaggaaagcggttcactcgcttgttgaggccgcccgcattcgcgccgaggcctgtatcattgtctcgacggaacccttcctcgaagtgtttcgccgtcactcggccaaggccgatgtggtgttcctggggctgcaaccaacgggcgatgaatcctctctggaggtgtaccaccgtctcaacgatctcctcgagtccatgcccaccacggtcctggttcgttccagtggtgaagcggatgtgttcgcttgagccggcgcagaccgatgctggcatccttcagggttcacgaaatacgggttaggagcagaggcgactgagttcgtccatggtcagactgctgagacgctcagtgacgagatgcgctgctgttaactgctcggcgtcgtaggtattcgtcacggccaccgtatgcatctgggcttcgtgggcggcttggagtccccagtgcgagtcctcgatgacgacgcatcgccccggggtgatgggagcggccgtcgattcgttgagtctctgcaacgccaggagaaaaccctcggggtcgggcttgccccgcgtgacgtcctcggccgagacgatgacatcgaacaggctacgcagtccggcgtcctggagcacccactcgatctcggtacgcagagaacccgagcagatcgcgatgggaacgctgccggttctcaacacgtcgaggaactcacggacgccttcaatgatctgcccatcggtccgcgcgagcttctcgaagacgcgggtcttcttggcgatgaggtcctcgatctggctcggttcagcgcccagtcgaccttcgtcgacaagcgccttgaagcagtccacatcgctcaggcccaggtactcggtgtagtattccttcttggtcaattcgagcccatggtgggctaacacgacgttgaaggcgcgaaagtgcagaacttcagagtcggtgatgaccccgtcgaagtcgaatatcacggctcccagcatgacggcaatgctctccctagacttcctggaccggcccgatcagagcgtcgtagtcgctgaaagtcgatttgtcgccctggcggaccaactcggtcagcgccttgatcttgggggcgttcttctcgatgtaacgccgggcgatcatggccttgcgctgtttcatcgggattgtctcgccattgccggtcgaggtgccggaggccgctgctacgtccatctcgaccttactgctggcttgaccgcagaacaaatacccgatgatcaggtcgatcgcgacatccgtcagggcccgaccgtagagatccatgtagtcgttgccccgctccttggtgaattcgatcgcggccctaagttgctcagtgccttcggccagcttgtccagcaggtccttgacctcggcatcgtattccagggcgaccaggtcggccagatacttctcggcggtcccgctgcagacgccccggacggccgcgacgacctgcaactggctggttccctcgtagatggtggtgatgcgggcgtcgcgggcgtgcctttcgctggcgtaatcacgcatgtacccgctgccgccgagcacctggatcgaatcgtaggcgacctggttgcacatctccgagcagaagtacttgctcatgggggtcagcagcccggcgtagcgcttataggcgcgggcccgattcttcagtgccttgagttcggctttgtcctggggcggattgttctccacctgtctgttgtatccgaccgccaggtccacgatccgggacgtatcatagagcagagcgcgtccagcctcgatggcgatcttggtgtcaatcaacatatcgcgcacggccggcagtctctcgatcgccacgccgaactgcgcgcggctggcggcgtaatcccgcgcgatccgataggccgcttcggcgatccccatcgactgggcggcaatcccgatgcgggccccgttcatcagcgtcgcgacataaggcgccaaaccgcgtttgcgctcgccgatgagtttgcagggcgtgttgtcgaagaagatctcgcacgtgggtgagccgtgaatgccgagcttgtcttcgaggcggcgaatatggacggtcgggcccggcccgcagacgaacaggctcagtcccagtccgccgctgcggtccgcttcgctgcgggacagcaccagcaggacgtcgccgcacccgttggtgatgaaacgcttgacgccatgcaggaaccagttgccctcatcgtcctggaaggccctcagcttcacggcctgcagatccgagccggcgtccggttcggtcaagaccatcgcgccggtgaccgtccctgcggcgaagggcggcaaatattcctgcttgatctcttccgaggcaaaggcatcgatcgtctcgccgatcccctgcaagccgaacacgttcatcagcgaagcgtcggcccgtgagatcatctcgttggccatcgaatagaccaggttggggaaattcaggccgccgaagcggtagggcagcgtgaagcccatcacctcggcttgggcgagtttctccaaggcctcggtgatgcccttggcccgcgtcacggagccgtcctcgttgagcgtgttgccttcccgatctacgtcctcggcctggggggcgatgacgtcggcgctcagttcgccaagcgagttcagcaccatatcgtagttctgaacggcctcatccggatcggccggcgcatagtcaaattcctgggcaaaccgaaaatcttcctcggtcatcgccgccagttgctgctggtcaatatgctggaacaggaactgaatatcgtcgttgtctttgtagaagttccccatgtctatcccgctatcatgagtttcgtaacgttacacgctcaactggcgtctatcctcggcccacggctcctcaccggcggccgaggcgttcctctgtgggtcagtcctttatgctcttctctttgatcgacttgatcattctcggtatgacctcgttgagatcgccgacgatcttgtagtgggcgatgccaaagatcggcgcatcgggatcgttgttgatggcgacgattttctggctctgggccataccggcctggtgctgaatggcgccgctgatccccacggcgatgtagaggctgggccgaactgtcgtgccggtctgacccacctggtggtcgtggtcgataaagcccagatcgaccgccggacgggtggccgccggggcggcgcccaggcaattggccagatcccaaatcagtttgaagttctccttgctgccgacgccggcgcctccggcaacgatgagccgggcggccttgagatcgaccttcttggcccgcttgtgctcctggagaatctcaagcggcagatcatcctgggccagcttgaccgtttcggtgacgatcacgccgtgatggttgacgttcggttcgggcatgggcatgacgccctctcggaccgttgccatctgaggccaccgatcgtagttgatgatcgtggcgatgatattgcccccgaaggccggacgaatctggaatagcagattctcgtggatctctccgtccttggcggtcttatggtcgccgatttgcagatcggtgcagtcggctgtcaggccggccttggcggcgctggcgatgcgcggcgccagatcgcgaccggccaccgtcgcgccgtacagaacgatctgtggttcgtgtttgtggatcaggtcgaggatgactttggcgtagctgttagtctgataagcgcccaaaagcgggtgctcgaccaggtagaccttgtcggccccgtattggatcagcggggtgcaaaggtccttgacgccgtctcccaagagtacgaccgccagcttcactttcagcgtatcggccagatgcctggctttgctcatcagctcgaccggtgtctcttccagcgcgctgccgtgctgctcggcgaacacccaaacttcaccttctctatttacatcgatcatgaaaaacctgaatttgcaaatgaaccttgtgattccaggggcctcaaggcgaagggcccgcgcacagagtgctggtgtacctaagcgatgatcttatcctggatcagttcgtggatcatgtcggtgatgccgtcttcagtcggctcgatgtccttgctttccttggccgcgaggactacgctttgaatccgatggaccttggtgggtgagccgtttcggccgcaccagctcagatccgcttcgagatcatccagatcccagtgcttgattagcaggcctcgggcttccagagcctcgcaacgcgttgcgatcaactcctgcatctcggcctcgaccgcgtccggattgatcgcctgaatctcctgggccacctcaagacgggtacgcgccttcttgcacttcatcaaatgcttggctgcggccacgcgcggcgtgttggtctcgcccgttacggtcaacaggacgggcaactgggccttgacctgttgccaaccgttgccgatattgcggcgggccgtgatttctcggtcctccagggcctctagcgcctcgcagtacgtgatctgcgtgagccccagcttttcagccaattgcgggccgacctgggcggtatccccgtcgatggcctgacgaccacacagcacgatgtcgcaatccagcttcttgacggcgcaactgaggatatagctggtcgccagcgtatcactagcggcgcaacgccgatcggtgaccaggatagcgccatcggcgccccgatagagggattcgcgcagaatccgcgtcgccccgggcaatcccatcgtgatcacggtcacgcgaccgccgaagcgatccttgatctgaagggccagttcgagggcgttcaggtcttcgggattgaaaatagccggcagcgccgaacggttcaccgtgccatcgtcgttcatgacctggccggttattctctgggtgtctggcacttgcttggccagcacaacacagtgatatgccacgtaagatctcctatcagcccttccttgcctgacatttgttttcggaaacgccttagtttaccggccttgacgctcaggtcaaccctaaaacgaaaacacgaagaagggtgatatttccgggccttagcgaaaaactactaaaccgctatgcccaaaaggccgattgagttcacgatggagccgtctccagggcagaatgcgcagtttctttttgacaacggtgtttataaatcgataatgatcgccagcggtggtgttatcggatgtgaccaccggagccgacaatcaggcttcttggcgtaaggatgcggcccctgggacagccaggggatttttacatgacgagtgaaaccagttacgatacggtatttggcaaactggcggttgaccaggggctctgtacggacaaggagctccgcaactccgtgaaggaattgcaggaacgccgcaagatcaatcccgtcatgctccaggaacttctgatcgagttgggctacattaccgccacgcaggctacgcggctcaaacgaagcattcggggcaacaaggcggccgttcaccagatcccgggctacaagattctgggcaagatcggcgccggggccatggccttcgtttacaaggccaagcaactcagcctcaaccgcaccgtcgccatcaaggtccttcccaagcgcttcagtgagaatcccgagtacgtgcagcggttctataaggaaggccaggcggccggtaagctcaaccatcccaatatcgttcaggccatcgacgtgggcgaagcggggggctaccactatttcgtcatggagtacgtcgagggcaagaccatcgccgacgacatcgccgagggcgccttcccggagaagagtgcgatcgaggtcatcatccaggtgacccacgccctggaacacgcccactcacacgggctggtccaccgcgacgtcaagcccaagaacatcatgatcaaccagcaaggcgtggtcaagctggccgacatgggtctggcccgggagacgacggatatcgaggccgcccagagtgaggccggcaaggcttatgggaccccgtactacatcgcacccgagcagattcgcggcaagatcgatatcgacggccgggcggatatctacggtctcggtgcgaccttctatcatatggtcaccgggcaggtccccttcacgggcgacgattcctcggagatcatgaagaagcatctgcgcgagaagctggtcccgccggatcatctcgttacttcgctctcggccggtgtctccgaggtcattgagatcatgatggccaaaccccgcgacgaccgatacaacaacatcgaggagttgctggtggacctggaggccctgcgcgatgggcatccgccgttgcaggcgcacaagcggttcgatgtctccgtcctcgagaagttggaagaaggggagaccgtcgaagcggaggatatggattacgccgaggagaagatcaaccggctctggatggctgtcatggtcctggcagtcgtctcgttcgttgcggtgatgatcattgtgctgatgctggcgttctgaggccagcgccgcgttgcggtcgccgggccgtatcgaaagaccttcccaatgcccagaggaggagccaatttttcgtcggaggagcttgtccgcgtcttgagtcactacgacgtgggggtggttcaccgcgtcaagccgctctcggcgggcaaccgacgggcccccaaggtgatcgtgcgggccgacaagggtaccttccttctcaaacgccgtccgaaaggtcgcgacgatctggcgcgtgtggccttcgtccatgccgtccagaagcatctggccagccaggcgtttcccgtgacgtccctggtgacgaccagcgacgagcataagacggttctgaacatcgatcgtcatatgtatgagttgttcacctttgtcagtggttcgcgctgtgacgcgtcgcccaaggcgaccgaagacgcggggcgacaactggcgaacctgcatcttcggatgggggattttgctcacgactacgaaccgtttcgaggcagctttcacgattcgtccaccgtccggcaacatctcaagatgattcggtcggaccaacgcgccggctcagcccgacggaccgaagctatcaccgaatcattgctgatccgctacgatcgctccagcaatcgcgtcaacaagctgggctacgaatcctggaaacgccaggtcgtccatggcgactggcacccgggcaacctgttgttctttggggccaaggtcgtgggcgtggtggatttcgattcgatccgaatcgcgccgcccctgacggacctggccaatgggatgctccagttctccatcgtaggcgactgttccgatccgacccagtggcccgacgccttcgacgagcccaggctcttccagttcctgacgggctaccgcgaggccgccaaggtgagcaaacgcaagctgcgcagtcttgtcgatctgatgatcgaagcgatgatcgctgaagccgtgctgccggtagccgccaccggttacttcggctatcactccggcgtcgacttcctccagatgatcctccgcaagaccaagtggctccgccaccatcgcaaatcaatgaccgagactattcttggtgtcacagcagccgacaagtgagccgctctacttcttctccatgggcggcagtggaggctgtccaggtgcgagtccgcccatcccgcccatgggcaggccgacaggcggtccaactggcggcgtctcggattcatccagtgtcttcctctgtgcttgagtcaagaccacaagcctccctggcctcggtatctcctgacccagggattcgatctgccccccgtcgatgagcactatcttgtccaggggggtggtcacggacgtctggacctcgacggtgctgatgatcgggaaggtgtagggatacctccccttgtgcattcgctcctcgttccccaagacggaggtgatctttgctttgacttcgagatagacgttgtccgaacctttctgcagatggggcgtggcgttgaactccacgccggcgtgaatcgactcatattgagcgaccggttcccccgaaggcccgtccggttcgctgaagccaacgaattgaggcaccgctcgcccgacgcgcatctccgcggattctccatccaggaccgtgaccatcggggcagcgagcgaacacgcatacctggtcccttgcgtcgctctcaagagaaatatgacttgcgtgtcatccagaagggcggcttcgcgtatccgctctccctcgccaagcgtcagtgccgtcaccagttcctccggcgtgttcggatcttcgaccaaccccttcaggaattcgtcactgacgtgcaaaaaccgcgcctcgatctggaccgcctccttcacttccttcgggtgctgggcggtcgcgtgcggctgtcctgagaacacgcccaccatattattgtaggcctgggcgacggcggcaaactccttcgccgctccggctacgtcttcatccaccgccttccgcaacgcggccagggcctcggccatctgggtgacgcttgcgtccaatggggttcccttcgccagggcggcggtctcggcggtgcgcgacaaggcccgtgcgacccactcgctcatctccgcctgctctgggcgacctgggcgtgtgagaacggacatagcgctgaacatcgtttccttgaacgcctgggcgagttcggggcctggaggccaggagcgggcggggccgctctcagagggtgcgatggtgatgtccatgggcggactgaccgcgcgaatcgggccgcctgttctcacccgggacgactccacgatgaccgccagccgaatcgtgtgtttgcccggtgccagttgcagggacgcccgtctgtaggtcgggtctacgccccaggcaaagccgtcgtctcgccattgcagatcttccggtttcgccttcgaccagatgggcgagagggtgacaggctgatcggccagcgactgtcccatgcccagaccggccagacgcacggcccacgagtcaggcggccatatgtaccagacgccgtccacctccaattgcgacctgcgctgtccggtggccaagtgcagaaattcccgcgcgccgacattctgtacgtcccagcgcaaagccgggatctcatctgttcgccaggtgtgtctgtccgcccgcaaccgaatctgcacaccctcctgcgccgccgaccagtcggtttgcatcgttgccggtgtggccgtcaccgggttcgctttgggttcgactggcagcacctgggctcggaccaggaggtagagaacgtcgtcctgctcaggttctcccgtctcgggcgtcagacgcaggacgagggtcgtgtcgttgtccagggtggctttggtgcggatgctgtgtgtgctcacgcgaggcctctggtcgtcgtcggcggggatcatatccgagacttcgacggccatctccaaggtgacttggccgctgctttcggcatggggtgtgacgctcactacggtgccgtactcgatcatctcgattgccggcggcgtgaccgtttctcctgacgcctcgcggcccaccggttccggcgcttcgtaatgctcctccgtgatgatcctgacttcggcacgcttgccgtttatggcctccaagcgaggtttggaaaccacctgcacgtattccccggattgcagtagatcgcttagtatctcaagtgcatccgagtctccctggccgttctgggcgcagcgtttgaagagctgtgccggtggaacttgtagttcctggatgtcaggcagtgatgcgcgcccgattcgtgcgacctttcgcttcccgtacatccgatcccacagacgcgatagccggttcgccgcctcacgagttaacgggcggtttcccgaagtgtccagaatctcaaagtccaacaagatccgcgtcttctcatcgattgaggacgcgctgtcgtctgtggcttccgtcagcacgcggatgggtgtcgattcgctggattcctccttttcaacgacgggatcatgggatgattgctccaattccttctgcctctgctcaagacgctggttcagcgccgccagcaactgctccttctcgacgattgtggggtgttttggcaccaggttctgctgagcagcgatgaggtccacttcaacctcggcgatcttcttcgccaattcctgggccatgggatcgataggagtggattccgattcctcacggctttgcgcgagacgccgggcaatgccggcatagaccccttcctcccattcccttcgccgctcctcaagacgcttcttcatcgccccaagcagcgcctctgtccgagtcagttcgggatgttttggccccaaagtctgtcgggccacgatcagttcttgctcgatctccacaacacgcttcagcaaattctccacgacgggatcggagttcacgtactctcgacgcgcagcgatcatcccctcgcctttttcaagaccggtctctgggaccaggcgggcggtcacgaagactgcgatatccttttctgaatcgggattgtttgtgccgactccggccacaaccaccgtgccgccatctttgattgtcacgacatttctgctggtgcgacgggtcacaacaggcagcttgccaccttgggccggagggatgctgtcactgtattcgagggccagttccagtatgatttcattgttgtcggcgatcctcggcatggccgaaatcaccgtcccggtcgcgatgctcacgcgttccggttgatccgttgtcgcggccggcggcatcgagaactgctcttccgtggtggcggtgacgcgggccagtcgcccgtcgattgccacgatccgctgtctcgccaccaatcgggcccgaccctgttggcaaagtcggtctagggtctcctgtacagagttcgtaaaggcctcgtcggctgtatagcctatctggacaccccagggcgacccgcttgctgcgccggacgcggaagccggggcgttgccgaaagctccggcgctgatctgcggggcactccattcgacgcccagatccgcgaggtcgctgcgctcgatggccacggttcggaaatccaacaacacctgacgcggacggttgtcgctctggtgggttgatgggacagacagaggctcctgctgagccgcagacttgacgatggttggcttgaccagcaggagaacaatgctggttcttgtgtccagcctttcacttgccggttcggtagtgacagtgagaggatacatagcgtatttgttgttgcggaaggttgacgttatgtcgaacttggctccttccatcctcatgcttacgttgccatcgttgtcgagttgcgccaagctccgaatatggaatcccaaagacaacctgatggtgtcctggtcgtcctgaaccgttggcgtgacgtccaaacgcaggcctataccctctgcgttgtccgaggaatccggggcatctgaattggggtcctcaccaacaattatcgaggcgggtcggccgtcgcgtgttacaatatgcggtctgctcagtatctctccatagcctctcgatattagcagatcggtgaacgccttggcgccgccggcagtcaggttcaaggagttcgtgtatttcttgaggatttgccagagtggtttctggagttcctccacggttggcagggtgaagtcgtcattcactacaacatctgcaaggagattcctggcttggacggccgtttcgtggtccagcgttgcgtcggaagcgaccttggcgatgacaaagtccaacaagacttgcctggcctcctggggcttctcggtggccaccgtcgcagccggcctctcgactggcaactcggggctggccaggacgagggcggtggggatgatgatggtggcgacgaggaggagggcgatcaggccggggagccaggcgaagcggcgctcggctggggtggggcggcccaggaggcggccgatgcgggcgacgaggctgcccccgttggcggccaccgccagttcggtcccgtggtggcgcatttcctccaggcaggtcagggcgcgggcatagcggaccgaatcgccacacactccgacggccaggtcgtcacagcagttctcccgctcatcccgaatttggcgcgagacccaccagaccgccgggtggtagaagcccaggatttccacgaccgattgggcgatattgacgagataatcgtagcggcggatatgcgccagttcgtgggcgaggatcgcttcgagttgttcggcttccaggcccgtcagggcgctggcgggcagcagaatcaccggcttgatccaccccacgacggtggggacgtcgacaagcgccgattccagcagttcgaccgcttggcggacgcccagacgctcggccagttctccgagtttcgtctgcacaggggcggcgacctctcgcaccatgcgccgtcgcatccgctgtagttgggcccagccgcccaggtgccaggccgagaggccaaagacacccagcagccagcccaggaccagccagggcagggccggttcgagagcggaagcgacccgttgcctccagggcacgcgaatggttgcatccgccacctccaggaccggcgcctcgatcggctcgacagacaactcggccacctcgattacttcgaccggcggtacctcggcgatgggcgctggggcggtgacaggacccgcctccgcgacgggtcctgagacctccacaagctgcatcgtaaccattggcagtgcgacgattagcgccagtgccaggcatgagacgatgtaccgcaggccggcgcttcggttgctcaggaatctcaggacgacggccagtagcagggcgatagctgttgcttgccagacgaaatggatcagcgtccagcccagccgctcgaccatcccctgcgacagtagttgctctaacgttgccatgactatgctccctccatttggtccagcatctcgcgaatgcgtttgagttccttgggcgagaccttcttggcgtccagggcccgcatgacgagcttctcagccgagccggcgaagaccttctccagcatgtcgcccaccacctgtttctgagtacgctcttcggagaccgccggtgtgtagatgtgctggcgaccggcgcccttgcgggtgagcaggcccttctcggccatgatctgcatcagcttgagcgtggtggtgtagcccgtctcgctgttggcgcccaacgcctcgtggatcgcccgaacggtgctggggccgcgctgccagagcacgccaagtatcgccagttctcgatccgtcggtccggggcgcttatgtcttgccatgagggtctccttggtcgattgtttttccgcatcactatctctatcggcaagtatacgaaggaattcgtagtaaatccacgaaaaaattcgtacttcgcagaaaagatttgtgcgatctcatctcacgaaccaggaaaggctcataccctataggcctctgtcatccttgagccgaaggcgaaggatctggccttggaatgaggggcaaccttcgtacgcagcccagatccttcactacgcagagctgcgttcaggatgacaagcggcgtatggactggccacaatccacgccatagctcgcctccttgcccatgaaaaagcccccgccagactgagtcgggcggaggcttctgtgttgcttgtggagaggtggttagcggatcgtgtggaactcctcaacctcctctgtctcaacccttttctggctgcgttcgaggagttgctccaggagctttcgcatctgcgtcatctcctcgtgcatgccgttgatcttgccacgcagttcttcgacctcgacctcgatcccgggtcgttcccgcggcgcatcgcccagtcgcctggtctcgccttcgagcgactcacggcgctggtgctgtgaatcttccagttgctcctcaacgtgaatcatctcttcgtggaggttgtcgaggtgggcgcggagttcgcgagccttgtcgctgtcggggtcgtccattcgttccagcctgtgcttcacctcggtcccgtgcgcctgcagttcgtgcaaatgctccgccagtttctgtgtatgctcgtgtgctccggcggcccgctgttgatccaggtgggcgtgctcgcggtccagtgacttcatgtgctcgtgaatctcgcgcagctcgacgatgatctgttccctcttctccgacggcctgtctcccaacgcctccaactcccgttccatcagacgcatcttctcgcccagttcttcctggtgccgcgccaattccctggcgtgcgcctcggtgtcgtggagttgctcggcatgcgcgcgccggtccttcaaatcttcttcgtgtgtctcgttctcctgcttatgtctctcgttgcgcaaggcctccaatattttctcttcgtcggctattcgcgcatggagttgattgacctggtccttcagtacgcggcccgtccggctgtcagggtcctccatatactccaatcgtcgcttgacctgggtgacgaattcccgatcgagttgcaggcgttcggtcagttccagttccggcacccgctggcgggcctcgtcaggcagatacagctcgagatcggccaactcctgttccatgggctccatgtgttcgtggatctctcgcagttcggttgagagtcgctctcgcttttcggactgctcttctcccaaggcttcaagctcttgctccaaagggcgggcttgcgccgccagttccccacgatgccgcctcaattccacgaaatgcatcgcgagtttctcggtgtgttccgcccgcttgcgccgcgcgtcggtccgtcgtgccttctgcaggctgccgagctgtcgctcgatgattccaatgtggtcgcggagggcgtccagttccgagcgcaggacgtgaccccgggcgcccggttcatctccctgtgcgtcgagggccgcttcggtctcgcggacctggtcgacgagttgatcgagcatgcgttccagcacattgcgccgcccggcgaccgccagttcgtgttgctcctcattatgctcgtgctgctctcgaaactcttggtgctcggtctgtccgtgttggtcgtgctcggcgggtcggtgttgggcgaaggccacgcccaccatgccgaccagcaccaggacgcagacggttcccatccagcgcgttccgattctcgggtctccgcattcctcgctcacgattctctgaattctctccttcatcgctttctcctttcccaggacggttggcacaaacgccatttctctttggggtgacaaatcgagcagtgactcggcgtaatcgacgcccgcctggccgctcgccagcacccagtcgtcacagacttcttcactcagtttcaacaatcggctcttggcccaccacagcagcgggtgccagggcatgatgcagaccatcagctcggccagcaatccgctgagatggtcgagccgcttccaatgcgccagttcgtggcagaacacgcccgccaggtcgtttgtctcggcggctctggcgatatcctgctgcaccaggagcaccggcggcttgcgccaacaccagatgaccgggctgcgcacgtcggtgctgcggcggatctccaacgcgacgtttaggccgaatcgggctcggacgctctccaacgtctccaggagtaacggggcctcgaccggttcggttttggccagcagtcgcagtcccaggccgaatcgcaacaacagacgactcaataggaggacacttgccgcgatccaggcaactcgcaagaccgtgctccacggtatgcggacggctgttgtctcttcgacgggggccgagactggaaccgccggcgccgtggcctccacagccaaaggttcgtattccaccacgccggcgactggtatggggggatcgatgttactgagcgggcccggcgcgacgaactctagcggttcagaaggtgcgggggccctggtggtcagtagacccaactcgaagtgctgcaccgagacgtacagagcaggcatcaccaccgaggccagcaagccgaccagtaggatctggtgggcccgtgcggcccggcggcgccagagatagctgcccgccaggcccagtccgagacaggtggtgccttgcagcaggagcaccagcccgagatggttttcggagactatctcgcccatcatttccgcatctccttcttcttctcgctgatcatcttcctcaggtcgccaagatcgtcctcgctcagatcgctctcgcggatcaagtgttggaacatggcgatcgcatcgccatcgaagacgcgtttgaggaaccccttcaccgaaccggcgcccgcttcgtcccggctccgcgtggggaagtagacgtagctcttgccgtcggggcggtggctcagccagccggtcttttcgagcttctgcagcgtggtcaagatggtggtgtaggccagcggcttttcgcgggccagtcggtcgcgcacctggtggacgctggcctctccccgctcccagacgacctccatgaccgcccgctgcaactgccctagtccgtcgagtgaatgcttgctcatcgcatgaacctccttatctttccgctgatactcgtcctacggttgactatcgtactatgttctatagtaggtggcaacaaaaaagaaaaattctctcagcaggggcggcgcaaggcaaaggcctccgagaggggacggtctctcggaggcccgagtggcggctatgggcttgtttgggtgcaggtaaacgcagcctgctaattgtactagtactgcccggcgctgccgaccgtgctcgggtggtcctccagcagcaaacgctccaacagttcgttggtctggcactgttcggccttcaattgctccatctcctcgcgcagctcccgacagaggtcctccttcgcctccctctcggcttcccgcacttctctgagttccaactccattcgttcgagctgttctttgtgctcaagctcgtgggggggcgggcccatgggccggtgcttcggcggacgaggcgccggggcgtgatgacggtggagttgcccctcgatctcgcggatctgcgcccgcgtctcatccagggcgcggcgcagctccatcgcttcggcgtcttcgtcccccatctcctcgagcatccgttgcatgtgctcggcccgctcctgcagggcgtgtagatgtgcggtgagttcctcgacctcacgccgggttttttccatcaggtggcgccggcgttcctgttgctcacgttcgcgctgggccaatgcttcctcgatgcccttcatctgctcgtgaatttcgcgcagctccatgtggacttcgtgacggcggcgctcggtgttctcacgcaactcttccaactccatctcacgctggcgggcccgctcggcgagttcctcgcgacgtcgcatgagttcttcgatctcttcctggataccgcgtagctcggcgtggatatcgcgctggcgatcctccaggttacgctgaagctcttccatttccatctctttgtggtgggccgcttcgagaagctcctcgcggtgccgcatcagctcttgaaggtgtcggtcgggctcacctctcggttccggcggcgcttcccggcccattctcgccaagcgatgctcgaccacttgagtctctgcgcacaactgttcgagtttggcctgcagatcgtgtttctcgtcgttcgtttcggtgtccatctcgcgcaggcgggtctcgatctcattggtttcgttgacaaggcgatctaatcgtgcggccatggcctcgcgatgttcggcctgctcgcgctgctcttgccgttggattctttgcatcgcgacccggtcgtgttccggatggtgatattgaacgtactcggtcgttgccttgtcgcgcgcgaccacatcgtgctcagggctcggcggctgggcataggccgcactggccaggaaaagcagcgccaacagcgcgatgatgaatgcccagggaatcccccttcggcggggcgcacaaacttgttctgcgatccttcgaattctctctctcatgactctctcctttactccgatgcgttgggtgggaccccttcttagcctcccccggtaagcgcgtgacagtgtctctctctcaaagcgaccgtcgacagcgtgggtggagatgctcggggtgggtttgacgcgaaggcgggggcctcgatcgtcccgatctacgtggtttcctcacatccatggcgctcctcctgagcggttcttcaccagaccctcctcgatccgactaacgttcaggattcacccgtattctaccgacacccatcccgggcgtctacctcggacaatacgtatttttttatctctcggtgcggcccatcccccgacgcaaagaagacagcccccacgcctctgcaagcatgggacccgtcataagtcattgttgagaagagagttacggtgtgtccttctctcgtctccaggccgcgacgcctatttcgattcctcctccgtaacaagccaaacctccgccggttgcgtctggatttcgaattgtaactcggtctgggccgtcacattggccagtagagcctccagtcgtcggcgtttctccgccatatcccggatggttcgcaccaggggcttgcgcaggtagacctgaaacgggatgatcgtctcctgctgtcgatctgtctggtcaatcattgttacgccgagcatcggtccgagtctttcgaggaactcgcccaccgatctggctccgtccatgaaccttccggcttcctcttcgcgcgtgggctgcgcttcgcccgcgaagatgcgaacattctcatcatcgaacaccgcgtggaatttgaattgtcccgttgcgatgacgacggcgtgctcggcggggcgctttttgaatcggatcgtgcgtcccatttcctcggtgaggagggcctccatcacgcgcagtttcgcctcccgaggcgcatcgctgcggacgatccaatcgcccggtcgttcgaggttgagcagttccttggggccctcatattcgtgatcctgcagtccgaccacatcctccagcagccggtggatgcgagatgtactgttgatgaacgacatgccacgtagctgcaatccaccatcccagtggaaacggaactggtggggcggttccgtcttgcgtgactccggttcgctcgcttcattgatgtaatagtccttccgttgcgggatgaacggcggaatgatgcgccgcaggatctcgccgtcctccaggcagtagactctgtcgaacccttgtcgccaggccggcgtggggagggcttccggttcctcagggggcacgcccagcatggcactgatcatctctctggctgcgttcagattcagagagccgaggacgtttccggcagggccgatcaggacgttcgtagaccaccgtgtgatatcgtatcgtccacaggtcgcgccgggacgctctctgcccgaaccctcatagaacgtcggctctccgccatcgatcgcaatgcggaaggggacatcggtcactccgccaaggcgttggtaggtgtcggtccagcgtcgctccagctccgccatcgagtcgcagttgtagatcgcgatgatggtcaggcccttgtcgcccaaggctttgtgaagcttcaccagtctgggcagatcgcgcggcacgctgggggattggccgccaaagtgaagcaggacggcctggcctcgcagttgggccagtgttaccggcccgccgttcttccagctcttgatgggccccaactgtggtgctgctttgcctatcagctttgtcagacccgtcggctcgagttccaccgtgccgaggtctaattccgattggtccttagggatcgtgacggtcagacgcttgtccctgagcgatgccgtgataggcgctgggatcccgttcttgccgcccgaaccgccaaattccaggacatactcgccgggtggcagcgggaagtcgaagggatacggcttcttccttgggtccgcgccaattacgacgttgtcggaccaacgcacattcgcggtggcccatcgcaatggcatgttcacgctctccaggtctggactgccaacgttgccgcgtacccgacagaccggtgcgagtcggatggtaaacgatttacctgcgtcggccggcgccagttcccataccgcaccgagaccccgctcctcgtgcaggatataaagccctcttgtcttccgtcctgctgggaggacgtccttcgtttggaagcgaaccgacccaccctcgctggatgtttgctcgtcgatccattccaacgtccccccgagcatgtcttcgcggaatgcaaccgacgtggagaccttcgcccccacgaccggcagcctgtcgtcatcgaccagtcgcaggaagatttgactcggatcgaggaggctgttcatccggattccggctgtttcaccaacgcccggctcagttaatgcggtttctagcaagaaaacccccaggtcgctcaggtgatccctcttcctatatctgtcctcagcgcgggccggcagaatcgattgccatgggctcaactccagatacgcctcgcctgattcagcagatacgcggtagatgtacttcgtgcgtacggcgatgttatcttgaatccccgtcccatcagggattcccattccggcaagcgtgaagcgcttcgggtccactgggacattcggatgaaactcggtgagcttggcgactgtatgatccgccagagtcctatcgtagagccaacgccgggcttctgcacgccgataccagaagacgccgttaccgtagtcttctatctccatgacctgctcacgaagcagtctgtcgtcgcgcacaaaccactgaaactttgcgatggagtgcccctttgccggcagtacccagattctgtatatcgagccatcggcatggctctccagatgccattccagaagcaggcagggctctccgttgagtcgtgactcactaacggtggggagatccccacgcgccgccagaaaacgggtgtgctgctctagggtgtcgatccactcgccaaagcgtacgtagcgtagcagcgtgggtccatctccgcgcccagtgcgattcggatcgtctccggctgtgatccacgccatgtgaccgtcgcggtcagagtcccgctgtaactgagtggtgacgatccggttgccccgcgtgatgatcacccgatggttgtccgaaggcgtagcgatgtaggatgatccctcctccgttgagtgaatcagtatttggcgcggcccttcagggtctggcgtgacgcgggtatcgacgcgggccttatgcccgtcaaaccactccgagcaactctcccgccacaagagggttcccttgtcctttgcgacatctctcctttcgatttcgagagttgcccgggcgctcttgagcttgctcaacgtacgtgtattcgcgcggatgatacgctcaacttccttgggcaactccacggccggcgaggcgattcccgccgaagcccaagtgggcggtgctaccgcctccgaccgcgtttgggcgaaggcgatggtgacagccagacacgccgcggcggttgcagtcgccagagaccagcgccggccactgtgaggactgctgcactggtcttctacaatccgccggatgcgaccggccagggttcgcttgcttgtcaccacgctcagtgccaaggcgctctggggttggaccgacagattcagcagggtgcgggcgtagcgggtgccggtctggccggcggcgatgacccaatcgtcgcaggcctgctcgctgagctgcttcaggcggcgctgggccagccaggccagcgggttccagggcagcacgcagagcaccagttcggtccagaggccgctgaggtggtcgcgccgcttccagtgggccagttcgtgacagacgatgccggtccagtcgatacctttgccttcgcccgccccgtgcggcacgagcaggatcggccggacgccccaacaccagatcaccggactgcgcgtctctgcactctttcgcagcagtacatcagtcctgaacccgagcttcgtcttggcgctttcgatggcgcgggcgatctcgtcgacgttgcatggctcagaccgctgggccagtcgaaaccccagcagaagacgcacgaccaagcggatcagcagggcggcgctgaagagggtccagacggccaggacaagccttgtccattcgataggctgagccgttgccgttgccgtcgccggcaggacgggcagagtcgcctcagaaacgctagcctgatcgatctctctgtcctgtgtcgattcgacggtagccggagcgtccagggcgacaaacgctggagggcgaacctcgaccaccaccggtctggactccagcatgccccattgatgctgcttgactacctggctaagcacaggcgccgcgatcgccgccaccagcgccaacagcaaaagctgatgagcccgaaccgctcgtcttctcaggaccagactccctccaagacccatcgccagggccgccgtgctctgccacgccagcggccagagccacgcatgttgcaccagtatgtcgccgatcatggtttcctctccgcttgctctgtctctttttctttgatcattcgcttcagttcgccgagttcgtcggcgctgagattgccctcggtgatcaggtgctggaacatcgccagggcgtcgcctgcgaagatgcgtttgacgagccgctggaccgagccggcgccggcctgctggcgggtctgggtggcgaagtagacgtagcttttacccgcagcccgatggtccagccaaccagccttctccagcttctgcatggctgagaggacggtcgtgtacgcgagcttcttctgacgggtcagacgctctcggacctgatggacactggcctcgcccagttcccagacggtctccaggacggcccgctgcagttcgcccagatcgtcgagtggtttccgcttcatcgctacttcctcctgaacgtgaccgctgtttctcactactccaatacaaagtactccatgccgtagtaggagtcaaatagaaaattaaaatcctctcaaattttcttttccgggcgacgcaggatttcacttgacggctcctgttccatggggtaaagtatatacacaacgaaactattgttgagatataacgatgaataatcactcatcaacaatccatcatcgatcaagcaggaccctgctgtgctggccgagcggcggaaaaacgggcggatcgggggaggtttattatgcaaaacaaacccaattatcgttgtttttgggccaggaatgcggatcgagccgggaaaacaaagccaaacaaaccgaatcaaagccaattggggtggcacggcgactatgcggagagccctggatgcgtgtctcggcgagaagcgaattgacaggcgaagggaaacaccgtagtttagggcagcctaaaaatgagtgaccacccaacacaactcagcgacagtctcgaggattatctcgaagcgatcttctggatcgcctcgaagaagggggcggcgcgggccaaggatatcgccaaggcgctgaaggttcgggccgcttcggtgaccggggcgctgcgtctgttggccgagcggaagctcattcactacgctccctatgaggtcattacgctgacgtcggaaggtcgcaaggaggccgagaagatcatccagaaacacgaggttctcaagggcttcttcgtcggcctgctgggcatcgacgaggacctggccgaagagggggcctgccgactcgaacacggcctgcccgatccgattatggagaggctactggcgttcaccgagttcgttcagtcctgcccccggtgtggggaggactggcggcggcaattcctggatggttgtacggcgcgtcgcgacgcgccttgctcagattgtctgaaggattgcctggggcgtttcgagcggggcgaatcgcagatgcaggccaccgccggccggcccctgacggagattcagccggggagcaagtgcatcgtcaagcgtatccggaaccggcggacggtcgcccggcgcctggtggagatgggggtccagtgtgggacggtggtcgaggtcaaggccgtggcgcccctgggggacccgatcgcggtgaaggtgcgggggtaccatctctcgctccgaggtgaggaagcgaaaaacatcgaggtggttccggtatgagtcttccgtctttcgggggatcgtacggagatctttcacatcttcggttcaggacggacggggcggtggaggtatagatagatacggtggggagggtcgtgtcggaccacttctgctgggcgagtgaatgaaaacgggccctgaaccaactgattcagagcccgtcgtatacgatcgaagaggccggaggttactcggtttcctgcgccttcttgtgcgcggcgacgatctgctgctgcacgttgggcgggaccggctcgtagtggctcagggccattgagtagctgcctcgtccaccggtgacgctcttgagctgtccggtgtactgggtgacttcggacagcgggacctgggccttgatgacgatgaagttgccgggcagcacgtcctggccgatcacgcgtccgcgtttggaggacagatcgcccgtgatgtcaccgacgttgtcggccgggatagtcacttccatatcgacgatcggttccaatagggcgggcttggccttctggatcgcgtcgatgaaggcgcccttgccggcggcgcggaaggccacttccttggagtccacgggatggtgcttgccatcgtagacggagaccttgatgtcctggagtggatagccggcgaccacgccggtgtgcatcacgtcgttgacgcccttggcaatcgccggttcgaactggcgcgggaccgagccgccgaagatgtcccaactgaactgcatggggggctcactgttgcgctcggtcggctccacccggagatagacctcgccaaactggccggcgccgccggtctgtttcttgtgtcggtagtggccttcggccttgcccgtaatcgtttcgcggtaagggattttcggttccttggtgttgaccgaaagcttgaaccgcttttccatcttctcgagcactatccgcaggtgcaactcgcccaggccattggccaccagttccttggtctgcgcatcgtggctaatcttgaagcaggggtcttcctcgcacagcttctcgagggcgccgccgatcttctgttcgtcgcctcgggaagccggttccagcgccagggagaacatcggtgacgggacgggcaacatcgggaatgagccggccacctggccgccatgtacgaggtcgcccacccggagttcttcaagttttgccagcgtgatgatgtccccggccacgccggcttcgacttcggtgtagtcggttccctgagacttgaggatatgtccgggccgcagtcccttcttatcgttattgtgcatcagggtcgtatcggacttgagcgttccgctgaagaggcgaacgctcgagtacttcatgttggatttcggatcgaagcccacccggaacacgagacccgccagcggaccggccgcgtcggccttcagttccatgacggtctcaccatcgattagcttcgccggatcagcgtcggccggcgacgggctgcattgagcgatcaggtccaacaactccgtcacgcccacttcctctcgtgcctcggtgaagagaatgggcatcaccgtccctgccttgagcgccgtgacgaagaccgaggccacttgctcggacgagatttcctcatcattcaggtaacttatcatcaaggcatcgtcggcttcgatgacgctgtcgatcagctcggtgtgcgcctgggccacatccatcacgggggaatcgccactgtcattggtgatgcagtcaatgacagaccccttatctgccgagggtagattggcgcaggcgcagcggcactgcgagccgaaggtttcctggatcgtctggaccagttcgcccatctcgacgttctcggcgcccatcttgttaatgacgatgatgaccggcttgttcgcctctcgggccagttggaacatcttgcgggtgttggtctcgatgccggcggtggcgctgatcacgagaatggtcgtctcagcggcggggatggatgtaatagccgggccggtgaagtcggggtaaccgggcgtgtcgatgagattgatcaacttgccgccgtgctccacgtggacgatggctgagaggatagagtgctgatgctccctttcttcgtcatagtagtcacaggtactggttttgtcgtcaacgctccccaggcggcttgttacgccggttttgtggagtattgcctcggccagcgaggtcttgccgctgccgccatgtcctagcaggaccacgtttcgaatgtcgcctgttgctgccactttacaacctccaaaaaggttttctaccgcgtttctcttcctgcctccaaaaccctgaatgttataagaattggggcggtccactcaagaggtttttcgtcaaattgccgacttgggcctgttttacacaggaaaaacgcaaatgtcttggccgatggcctgtggttggagcgcattggcgtagttaggtgagggcaattcttgacgagaagacccgcgttagaggtcctggacgaggcggtgtatccgctcgtatagggggatcagcaagggcgtgacgatacagcctttgcaggtccaatgaaacagggtttcctgctcgtaaatggggaattcgttcggggcatacggctgacggacatactgagcgacgcaacaaggggggtagccgaacaggaatccctcgattctgaccgtctcggcggatttgtccacggggaggttatcgaagtgactggcgtacgcctcccggtaggccggggtcctgctgaagatggtttccgtgaacgccttgccggttcggaccgtgcgggacacctgccggacctgcaggccgctctgttccagggcctcgaggccgggcttctccagggacttttcccagcggctcagtggcttgagaccctctcgcgtcagcagggccagataggccagttcgaaatcgacggttttcagataccggagcgcctgcgctattggacgagccaattccgcctgcatatcagttgggcagtcagaaggggtcattcgtcactggcctcgatagagttctgccaccgttcggcgaataccgccaggtcctcgatatcgaccttgcagtccctgttcaggtcggccggctgatatagggtgcccaggtctccgcactcggagggtagctcgaggatcttcagcagacccgctacgttcgttcggtccgcgccgtggatgtcgctgaggtaactaaatgagccatgttgcatgaaatgccgggcgatttccggcacatccattgatgttcccgagttgggattgacgatttgccagtaccccatgttgaccggttggccgcagatttcacaccattccaggcctctcaacatgtagttgattttatacacgcccttggcgtcggggctgtcgggctcgaggatcggcaggtgatcgatcacctcggcgcaccgttgggccaattgaattccatcgggcaagaggttttcgtcctggtcggcgtcgtagagattcagtccggccgccagttcctcgctgtcggccaataggtctgcgtccaggtcattcgcatccggggcgatccgctcggcggatgccgcagtgtaatccagtgacagttggtggtcgttgggctcgtatgggaatcgaagctcaagtgtcctggcgagcctggcgatatcgaggcggcctcgatggatgtccccggcatggctgaacgatccatgctccatgtagtgcgaggcaatgatgggaatatcgaggttgagtcccaaccttgggttgatgattcgcacagagcccatgttaacagtctctccacagacgtcacatgtctccagtccgaacaacagccactcttccttgcaaatctgatgggggctcgtgacctccgccttcaagggcagttctgcgatgacttgcgcgcaccgcatggccaactcggctccgtcggcggcgccgttgttgttctgatcgccttggaatggctggtgtccgagggcgacttcttcgcgatcggccaggaggtcggcgtcggcatctgcgtcgagggcgacctgatgcttgtcggccagcgccccgaccggcggatcggccagcacggcgtgggttgccaatgataatgatatggcggtcgccgtaccggcggtgaggacatgacgtctcaaacgtcggcctgcttgggcgtgttttctttgggttctcttgagctttctcatgtcaatcctctctagggataaccgttcaccgcaacactcgaatccatcggcattgtatcataaggacgaggcgcggtccagagaccgcgccgggaccacagcgttgccgccggttcttatgaagcgactcggtttcgcctctgctctcaaatacgccgattggtaaagagcgtttaaagggaggtcggcaaaaagtcgtgggaacgtcaaaaaaaatcggctgctctgccgaccagtgtcacgattgattttattggacagttgcagacgtcgccacttgagaccgaattgttgatcaatatgttgtggttctggctgcgagggtctcctatgtcgtggcttcggttatggggcgttcgcctctcggctttggaggtgactaaagaaaagggcgccttcctgccgatatgccacaagtcttaagggcagagcacgacgggttattttaggatgcttgaggatggacaagaacgaactgattgactgcatttgcgaaatcaaccgcagcgcgaagacagaatttctcgcccagttctcggaagaggatctgaccgcctacctcgagcatttgatggaactggatctgcacgagttagcggtctgtagctagctgccggtctctgacgttgtctcgccgccgccctcggactatgggtgggctgatgtcgcgatgcccggtgacatcagcagtatcgtcccctcgccaggctttgtttctccccccgcagtagccattgcgtcgctgaacttgacgccagagtcccctccgtggtcctcgttacgatcgagggcgctgtcggtcaggagttgaccggccaggttgaggcaggctgccgcacctgccttcatcgcgaggccggcggccgtgcgttctagcgcgatccgtcgcgggaaggggcggcctctgagtcgttctctttgggcttgaacgaagcatcgaacgagatcggctgtggggcctcttcttcggcgaccggcgccgagagcagttcgagattgttctgtttgaaaccgagcagggttgggaccattggggtcggtacgtaaaaggcaaaatcgatctctatggctttcttctctttgtcggagctctgaatcgacatcacctcgtggagcggcttaaattccaaccgccctttagcgccgatgtagccgatgggatacacagcttgcccctgtccggcgagagggtcatcggcgtcggctttcggaacgcaaaccacgcgcagttgagagagcgtgaactttcctgcgtcctgcagcgcgttcttcctgatcccgacgcgtacgagcatgagcttctcgccactacgagccggcagcgcctggccttccgtgtcgcggagcgaactgggggcctcccagacggccttgtcggacacgctcagcgcgggcttcgtcgtcgcggccggcacgtccttcttgtgccgattcagatggagttggtcgacgtaattggcatgcagaacggcaaaactcctgggcttgcccagggccgcaaagctgcccttgctgacggtcccaaagaagccggcgatgaacccgtcgggactgagcatgggcttgttcggctgggccgggtcgatgttccgctcgttgaaccgtgcatacggatagctctggggcaggggggccgtcgccaaggccagcagcaggttgccggtgatgatatacccgaggatgatgccgcaaaccacgcgtccgatgcgctcgggccacaggccgagttcaaccttttccttgccgatctgcatgacaatcgtctgtaggattgccaaggccagaacgaacagcaacaagaagcagatcatctgggcccaggcggcgatggcggccgagtatttggccaacatcgtggccagcgtctcgaagaatgcacaggccacgaagctggcgaacagcgcgttgaagatcaacgcgagtccttgcgtcagggtccccttgaggtatagaaccgccgcacagcccaatatgattgcaagcattaccaaactgaccattccacgttctccgttttctcagggatgccgaccgcttcgaggcggcaccaggatgttcttacttggctgcggggcgccccggtttcttgcccgacgagagcactcggagcacttcgttgatcgcggtttttccggcgatcacctttctgagggcctgctcctgcaagtacagcatcttggcccgtcggaattgcatgccgagttccggcaactgcttcacctggcggatggccttgcgcagttcgtcgttgagtacaatcatctcgaagacgccggcccggccgacgtagccggttccctggcactggtcgcacaccgaaggcttgcctcgtttgtcgtagacctctttacccggacgatacagcaccttggccttttcggccgggaggttgaatttcttcaataactctttgttcggagcgtagccttgcttgcactcatcacatagcgttcgcatcatgcgctggtcgctgatgccgatgagggtctcggcgatcaatttcttgtcgccaaccatcttgatccatttgcccagggcctgcaagacactgtcggcctgcaggacgacgtagacgagcttgccgtcctgggcggcggcgctggcgattttggcggtctcggcgtcctcgcactcgccaatgccgaccacgtccgatcccatcctcaccatggactggagtttcgtcgcatacgtgccggttcccgtgtcggtgggactaaagacgtgctgagtgatattgagcagttgcgtcgccggctgtttctccagcgtattgatattattaagaaaggcgtcgtgatgtcgcaccagggcgtacagcgtcgtcgtgattccgctcttgcggggcccggcgatgaggaagagcccctgagttttctcgcgcatatggtccaggtgttcctgctgatcgggggccaatcccagttcgccgatacgcaagtcgtgttctttggagacctgtttcaagcggacctgctctccggccgtcgagccggcggacatcacttcccattccacgttttgcttcttctgtgccgtgcggaatttgcccttttgcggcttgcgcttctcgctggcgtcgagggcggccagttccttgaggaagtggataaggtactccatctgttcgcgcgggacggcgggctgcttggtggcggccccgtcgatgtggtaggtcacctcgtagctgtcgcctttgggagcgaacatgacggtgctggctcgacgccacatggcgtctgtgagcacgtcgtaggcggttcggtagccgaagaacatcggggtgcgcggctcgggagtcgggacttcgttgttgttggcggtgatgaactggaagttctccatcgcctcgagcttttcggacttggcgaaggtgtgtttgatatgctcgatcgtcaggactcggtcgaaatcaagcacgcgggtgttgcggtgcctgacgtaggccagccccgtgccgccgacggcggccaggaaagccagcaatccgacgatgaagaccggaatcagccaccaaagcaggatgcctagggcgccggctccaacgatcagaccgatccagaagccaatgtttgtgtcgactgcttttgcatccttgtgggcccaggtcaccagcagaaaccagaggaaatacaggatgaggaaggcaatcagcttgacgattgagacgtagccgccgtactcgatggacattaacagaaaatctggcattgaacgctccgttaccacaaagttgtgaccgcgcgatgaacggcacgcgcggtcttcgcgtcattgactaaaggatgcctccggtggttgttcgaatccccttcagcgccatcttgagttcctcggtgtttggcgccacggggtaggcgtccttgggatcgacccatccgtcttcgatgagtttgcagaggctgtccgtcaggtcgaccatgccttcgcgctgggaccctcgaatcacgctgggcaagtcggcctcgcggccctccgagatgagctttcgcacggaaggattggccaacatcacctcgacggccggaacgcgcgggatgccttctcggatgcagggcaggagggcttgactgacgattgctcggagggccagcgccagcgtctgtcgcaccagttcacgctcttcctgggggaaaaggtccagcaagcggtggacagcctgtgaggcgttggacgagtgcatggtccccatgacgaggtgtcccgtctctgcggcgcgcatcccggctgtgacagtccgggcgtcacgcatttcgccgacaaacacaacatccgggtcctgtcgcatgaggtaggtcagcgcctcgacgaagtccggcacatcgatcccgatttctcgttgcgagacgatggctttgttgtcgttataaaggtactcgatcggatcttctacggtcacgatgtgacaagcacgcgtttgcgtgatatggtccagcatcgcggcgatggttgtggtcttgccggagccggtggcgccgaccaccagaaccagtccctgatgcgccgcggccacctgctccaatacggggggcaggtgcaggctctcgaacgagggcacatgggcgctgacgcgccgggccaccaggctgatcaggcctcgctggcgaaagacattgatccggaaccggtgctccttgccaatctcatgcgcgaaatcgagtgtcccgttcttgatgaagaagtccttctgagtcggactcaggatctcgaacactaactcttccatgcgctcaggggtgagcacttcgccggttgtgttcttcagactgccctgcagacgcagcttgggcggttgtccgaccttgagatggatgtcgttggcctcggtcttgatggccactttgaagtaccggttcagctgaggctcgtggtccagtgccttgtgggcatccaggggttgatctggtgtcatgatcttgctaactccataaacgaaaagaccggccaccgtgtgccggttgccctagcacaagccaacaacccgccgaccgtctgcgagaagatttgcagcgacaaacctttatgactacgtattataagacacagttccacctgttgtcaagcctgatactttcaggattcgcccgattctccgcctctcttaacaggattgtttttggtttagttgccgtgtcctcctgatccgtgcatgtggctcctggtgggcccgataatctacttcctggaggggcctgccggcgtgctggggcttttgtctttgattgttgcctggagtcacgctatagtcggcctgcgcggcctccggatgtccgggaggctgtgcgattgggatgcttgtgggaattggagccaagaagggtctatggcgcgtggcttgttttacaatctcggtagaaaagtgggccccaaggtccgcaaggccaggtgggtctgggagtccgtggcgggcaccgagaccgacaccattcgactggagcacggcgttggtatggacctggcccaggaggcccggaggcagcttcaaggggaccctgagacggcgcaggtgctggaggaggtcggtggccggctggttggtcgggtggcgaacaagctgcgttccttcgagttcgaggccttccagggcggtgaaccgaacgccttcgcgctgccgggcggcttcgttttcgtcagtcgtcccattgtagaactctgccagtgggacaaggacgaggtggccttcatcctggcccatgagatgggccatgtcatcaagggccatgccattgatcgcatcgtcaccaattcggccgtctctatcgcctcgcgggcgaccccggtgcgcggcgttctcggcccctggctgcagcgggtgggggtccagttcctggagaccgcctattcgcgggatcgagagctagaggcggatcgactcggcgttcgcctggccgcggcggccggctacgatccgaaggcctctctgaagttgttcgagagcctggcggcgataaaggcctcccccgatccacttgacctcggggcgtatttctccagccatccgaccttcgacgtgcgcatggagagcattcgccagtatatgcggcaatggtaactcagataggaggcgggccggttccgccggccagggcgacggccagggccatgtagattgtgacgctgatggagtcgttggcggttgtgaccagcggacctgaactgatcgccggatcgataccgatgccgcggaacaggaaggggagcatcaatcccagcgtggtcgccaccatgatagctgagaacatcgcggtgccgaaggcgaacaccaggcgggcgggttctatggccttctccgggattctcgtatggatcagaatggtgcaggccagagcccccatcaggccgcaactgagggctaccagaaacgcgatgcggacttcccgagtcaacaccgtgctgaatttcaatgccgccaggtgaccggttgcgaggccggagaccacgatggcggaggtctgaagcccggcattgccgctaatggctgcgatcatgggcacgaacgaggcggcggcgaggaacacgacctcgttgtatgtcttgaagaaggtcatcaccagtgccgtcacggctgtcccgatcaggcagggcagaagccaggtcatgcgaatacgggcggcgtgaaaggccgagaagctctccaactcgtccgggtccgtaccggccatcgtgtagaggtcctcggcggcttcctcctcggcgacctcgatcacgcggtcggccgtgatccggccggcgagtcgatggtccttatccaggacgggggccacgattagatcgttcttactaaagatattacggacctcttcctggtccatgtcggtctgcacgtagatggtgtccgggtcgatcaactcgccgaggcgcgtctgctcgggccgggtcagcaggaaacgcagacggacgtcgccgacgaatttcccatcctgatcgattacatagacggaatagaagtcctcatcgatctcagcggcgcgaatcttgctgaccgcctcggcgacggtggcgtcctgggccacgctgatgaccagcgggtccatgatcccgccggccgagtcctccgaatagcgcatcagcttgtggatctggagacggtccgtttgaggcagactgcctaatacctggtcggcgaactcgtcgggcatctccgccaagaggtcggccgcgtcgtcgtaatccaactcggagacgatcttcgggatctcgtgatccttgagcaactcgaaaagacgctcgcgcgtggcttcattgaccttttcgaggacttcggccgccaccggcgtctccagcatgtcgaagatctggcgtcgccggtcattgtccaccaactcgaccacttcggcgatgtcactggtccgctggtcatcgagaagggcgcggaggctcgccgcgtcctcggattcgagcaagagtccaatctcttccagtagttgtttctgctcttcggccatctgcgagcgcacaccgtttcccgttactcgtgctatcgaacgtggcaccaccatctgtcagtcgtgacaaaatcacccacctggcggacaagaatagtcgaatcagttatgtcgggcaactgttttgtcatgcgaccggtcctgacagatggggtcggccttggccaggccgggagaaggccctcgatttccggccatgcatttgctatactggcccataagtggtttatctgtgaggagagatgatggtcggcccagggccgataagaaacacgtcgaaccatcacgcttgctcctccaccggtctttctgagggttgtgtgaagaccgccgtagctgccgccggaactctgacgacacaagggacgcgctatgccaagatcgatcgttgcctactttgtttatgggatcatggctctcgccatggctggttcagcccggggggcttgtcctgtgggagatctgacgggggattgccgggtggacccgctggatctgtcggctctcttcgaccaatggctgctggaggttgacaccggggcggacctgaacgccaatggtcgggtagagctgggggattttagcagtctggcccaggcgtggcgcgccgcgccgattcccttggtgatcaacgaggtcatggcttcgaacagcaccttcgtgcaggatttgcagggcggtttcgacgactggatcgagattcacaatgccggtcggacgacgatcgacttggcggggatgtacctgacggatgatcccagtgacccaacccaatggcagttcccgaccgacaatcgcactcagacggcgattggtcccaaagggtacctggtcgtttgggccgatgaggataacaccggcgtcatgctgcatgcgcacttcaggctggacgccgatggagatgaggtgcacctgttcgataccgacggcgtaacgctcatcgatagcctggtctttggggaacagacctccaatatgtcctacggacgttaccccgacgccggcaactcccagcggttctttggctttcccaccctggggcgacccaacaacgaagggtatctgggggaggtcggtcccctgcgattcagtcatgaacgtggcttctatgacgatccgttcgatctgacgatcacttgcccgacggagggtgtcgagattatctacaccaccactggcaaggcgcctgatgacgaaagcggtcgtttccgagcgggtctgacctactccgacccccttcggatctctcggacgaccgccttgcgggccatggtcgtcaagcctgggtggaagccctcggagatcgcgacccacacgtacatcgtcaatgcttcggagagtattcgatcgctgcctgtcatctcactggtcggcgacaaggggcaaaccttctatgagcccgaaggggtcatggcgatcgtcggcggcacctacagcaacggcgtctggacctcgtcgggagcgggcagttataacaacgtactgaaccggggcctggagcgtcccgtttcgtgcgagtggatggaccccgagggggacgacatcttccaggtcgattgcggtctccgcgtgcacgggagcggttggatgcggccgcggtacattcggcagaatggtcagtggaccgggaacggaaaattcagtttgcggctctattttcgaaaccaatacggtccctcgcgcttgaccgtccctctctttgacgagtccgacgccgagcagttcaagagcatagtccttcgcggcgggcataacgatcggacgaatcctttcattaaggacgagcttctgcggcgtctgcacaaggacatgggccagcgggccagcatggggaacttcgccacactctttgttaacggggagtacaaaggctactacaaccccgccgagcacatcaaggaggaggcctgccaggaatggttcgatagcgaccagccttgggacatcatgacgatgaacggcattcgggacggcaaccaggagtcctggaacgagatgctcaattcggcctgctccaacaatctggccgtcgatgcgtcttatcgcgaggtgatgaacaaactggatatcgtctcgttcatcgattatctcattattcgcctctggcccaacgactgggattggccgcagaataactgggccgcggcggccgaacgatccgcgaccggtcggtggaagttctttgcctgggatgccgaggggaccttcgtgtcgagccagttgcatgtcgaccgattcggagaactcaacagccagaacaatgccaacgcgcaactctaccgggccctcaaggtcaacaagaacttccggcaactcttcgccgaccggctgtacaagcatttctacaatggcggcgccttgagcccgggcaatatcgaggcgcgattctccgacctccgcgatcagttgcgcggcgtcatcccgaatatgaacacgtatattatcgatggatggacgccgaatcgcgcccaggtcttcattgacgcctgtcttcgagaaggcatgtacaccttcgccggcccgaccttcgccgtcaacggttccagtaagcagggtggttacgccattgccggtgacctgttgcagatgattccccctcgacagggcgcgccgatctactacacgctggacggcaccgatccgagtggctctcagatgtcgaccgagacgcccatcgtgacacttgtggatcgcgctgcggccaaacgcgtcctcgtgccgaccgggccgaacgtgggggactggaccaacattcggggtttcaatgattcgaactggattctcgtcgaaggctatccgggcggtgtcggatacgaacacagttctggttatgaggactatctcggcgtcgatctcgagcgtctcatgtacaacaccaacggttcctgtctcattcggataccgttctctttctccggcgaccggggcgaactgggacagatgaccctggagatgcaatacgatgatgggtttgtcgcgtatctcaacggggccgagatcgcccggcgcagtttccagggcgaacctacatggaattcgactgcgacggcctcacatggagacaccgacgcggtggtcttcgaggccatcgatgtttccagctccctcctatcgttgcgaaacggcaccaatatgctcgctatccaggggctgaacagttccgtcaccagttcggatctcctgatcacccccaagctgaccgttgctcgcgatgttgtcgcagaggtgcctgacggggccatgctgtacgccgcgccgatcccgctgacgcaaagcgtgcgcgtcaaagcgcgtgttcgcaatggcaacatttggagcgcgctgaatgaggcgtcttttgccgtcgggccggtggccgaaagccttcgcatcagtgagattatgtaccatccggtggatatgggcggcccggacgatccgaacaccgagtatattgaactgatcaatgtggggcctgtgacgatcaacctgaatctcgtcagcttcaccgatggcgtcgattttactttgcccgagattgacttggcgccgcaagaccacgtgttggtcgttagagacctcgccgctttcgaggggcgatacggctcggaacttcctgttgtcggggtctatcaaggcagcctcagcaatgccggcgagcgcattgtgttgcaggatgcggtcggcgccgtgatccaggatctgcgatacagcgatgattggtacgacatcaccgacggcgccggtttctccctgacggtgcggcgtccagtcggcggtgtcccgatcgcccggaaccagaagagcgattggcgacccagcgccgccgcagggggttcgcccggtttcgacgacgccgatcagacgccgcctttaggggcggttgtcgtcaacgaggtgctcgccaattcggccggtggtgttcccgattggctggagctccacaacacgaccgatcaggcgataagcatcggtggctggttcctcagtgacgatgacgacgccctgaccaagtacgagattatggaaggcgccgtcatggctccctatggttatctggttctcagtgaggatcagcatttcggcaatgacggcgaccccggatgtcacgaggcgttcggcctgagtcgcgacggcgagaccgtctatttgcattcgggctttgaaggcgccctggccggctataacgagcaggtgacgttcggtccttccgatccgagtgtcacgctggggcggcatcggaccagcaccggcgctatcgatttcgttcccctcagcgcgcccacgccgggtcaggagaatgccgatccacaggtcggaccgatcgttatcagcgagatcatgtaccatccggccgggtccgaggacgccgagtacgtcgaattggtcaacgtgaccgatgcagatgtgacgctctatgatttcactcaggcggcgccctggcgtttcaccgacgatcccgacaatcccagcatcgaattgcttttgccgaccgacccgcccgtgacgttggcgccgtaccgttacctcgtgctggtcaaggaccgggcgcttttcgagagcgtttacaccgtgggtgcaacggcgcagattctcgaatggccggccgggagcctggacaacgccggtgaagtcctgcaactcagcacgccgggccgtctggatgacgaaggacagcgtccctgggtcgtcatggatcgtgtggcctacagtgacggtgcgcatccggaaaatttacctggcggcgtcgatccatggcccgtcggagccgatggccgggggctgtcgctgacacggaccgttcccgcccattatggcaacgaccccaacaactggcacaacgccgtcgattcacccggcgccagtcgccgtcgtcccggctagaccttgatgaaggtcttcttgcggtacatatagaagaggatcagccatatcacggcgacgctggcgacggcccggacgaagctgtgccaatcccccgtccattggctcagtccctggaccaggatgtcgcccaggtgccggaagtcgaatacgtgcgtcatcatgtagatggcaatggcgttggtcccgatgacgacgaaggggaaggccagaaagcgaagccggagcacgtcgatgaccaggtagaaaacccccagcagcagaaggctccagccaccggcgtagagcaccatcgaactggtccagaggtgcttgataatcgggaagatccgtccccaccagtgtcccaagtagatgcatgcgacgcccgaggccaggaggaagagcacttttctgactttccccaggtcggatcggagcaattggcctgcgaacgcgcccatcattacggtcgtcgcgaaggtcatgccgctgagaatccacgtatacgtcgtgccatcctggtagggacccaggatcagtttgtcaagatagatggcgagattgccttgctcggtgagttgcccggcgccgtgccccggtacggggaccagcatgagcaacgcccagtacagcagcaggagcgcgaccgtggcgattgcctgccaatgcgctttcaggttcaacaggaggaccgaggcgatcagatagccggcggcgatggcctggagggtgttgctgtagagacggagcgtcgccaagtcgtactcgagcaagcggccctgggcgatcatgcccagaacccacagaatgaccactcgaagcatgatgtgcaggtagattctggccttgctctgaccctgaccgagccgcttggcgaaggaaaatggcattgccgcacccaccacgaagagaaacagcggcatgatcagatcccaggcgacgaatccctcccagggcatgtgccgggtgtggggcatgatgacctggtcaaaccatgggctgttgagacccttggccagaccgccaagtatcccgcctcccccgatgatccatagcatgtcgaagcctcgcagggcgtcgagcgataccaggcgtccttccttcgcaacggcgggtttgtccacaggtatatccattcgagaatctccttcttcccttgtatcacaaggccactcctgcaccggcagggggttgacacgcatgccccggccgcttgtcgggggggcatgcgcaacgttgcggccaaaataacgccgcgcagccgcaaattcaatcctcattgtgcggcacacttttctggggggatatgcaagatatgtgtaaccgatgtgccttgagcattcactagacacttgagttggtgtgcagaggcctatctcgccggcgaaaatccgtcaaatctggatttggccacaataacgcggcaatttcctgcgtctatacctgtctgatggctttggcttttatcgggtctgatgcgctgtgaccgtgtcgtcaaggcgttttctcattgactttagtggtgtaaatagagaaactacattatttgggcatgcttatgaagcaacgcaaccatggagaagtggaccggtggaggctcaggtcgggagggacgcccctggcgatgctgctcttgctggcgggcgctgtcctggtcggctgtcggtctccccagcaacatcgcgagaaggctgatgaggtcgcttcggagattatcgcggccaagcagcaggaggcgctgggcaagaccgagccgttcagcatcgaacgaccgagcgatctgcttcggcgtcgtctgctggtcgagcagggtctgctttttgccgatgaggcgtcgctgggaaccgaccaactcgaacgcatcccacactggcccgaggacaactatccgctttcagtgacctcgcccgatgcggcgatcgcgattgagccgaacaagccgctcaagctcaccttggacgatgtgctgcagatcggggcgcggaacagcttcgactatcagtcccgcaaggagagcgtctttcggaccgcgcttaacctcgatctgacccgcaacgacttccgcaacatcttccgagccgacggggacagcacgctgaccgccgatacgaggggcgacgagaccgttacgacggtggactccggcgccgtggcgggcgtgacccggaccctcaagaacggcatggacttgagtaccgcggtggcgatcgatctggcgaacctcctgacgcaaggcggcgcctcctcgctggggctcagcgccgatgcgagtttctccgttcccttgctcagaggagcgggaaggcatattgtgaccgaatccctgacgcaggccgagcgcagcgtgatctacgaaatatgggatttcgagcgtttcaaacgttcgttcgccgtcgacgtggcgcgacgctacttcgatgtcctgcgccagatggatgcggtcgccaacgcccgcgacaactatcgcagcgccattacctcggcccggtggtcgcaacgacgggccgatgccgggcgcatccgcgagatcgaagtggaccaggctgtgcaacgtgagctgggggcccgcaacaattggatttccgcgcaggagcgactgaaagggaatctcgattccttcaagagtgcaatcggcctgcctcccgacgcactgatcgaactggacccgaacgatctcgtgcaactgcgaacgctctcggaagaaacgctcgaaacgatgcggaaggcctctcagcgagagacctccgaaacggctcccgcggccgatgcaccggtcgaactggtgccggccagctacgaggacgccgggacgctggaactggacccgatggtcgccgtgcaactggcgctggacaaccgactcgatttgcaggcggcgatcagcggagtttacgacgcccaacggcaggtcgtggttagggccgatgccctgagggccggcttgaacctgggcggttcggcagcgctggcagacaatgacgatgatggcagtttgagcttcgatggggcgcggtatagagccttgctctcgctggatctgcccatcgaaaggacggccgaacgcaacgcctatcgcaacagcctgatcaatctggagcgggccacgcgggacgttcagtcgctggaggatgacgtcaaactggccatccgcgatcagttgcgcacgcttctggagtcgcgtgagagtctgaagattcaggcccaatcggtggtggtagccgaaaaacgcgtacgaagcagtacgctttttctcgaggccggccggatagagattcgagatttgctggacgcccaggattcactgctctcagctcagaactctctgacttcagccgtcgtaagctatcgtattgcggagttggaactgcagcgcgatctggggcttctcgaagtaaacgaaaagggattgtggcgggaattctcgcccgaggacaacgatcatgacagctaaaaacggcaacaggaccagtggtggcggcaaatccttcaaggtggctggcgccctcgtgattattgtggcaatcggcctggcggtcgtttggctcaaggtggtccgagggggtgagtcggcttctatggaaatgtccaccttcgcagccgaacgcggacctctgaccatcagcgtgctcgagtcgggaacgatcaaatcccgcgagcaggagatcatcaagaacgaggtcgaggggcgtacgacgatcatttccctggttgccgagggaaagcgggtcaaggagggagatctgctggttgagctagacgccagcacgatggacgacgacaagatcgagcaagagattcggacgatgaacgccgaagcctcctatatcaacgccaaagagaccttggagatcaccaagagccagacgatcagcgatgtgaacgtggcggaactgaccctggagttcgccatccaggatctggagaagtacaagagcgggcagttccccaacgacgagacggccgctgagaaccagatcgagattgctcgtgaacgactcacccgcgacgaagagacgctgaaatggtcgaagcggctcttcgaagagaagtacatctcccagacggaactccaggccgacacgttgaccgtcagccaggccaagaacaatctgcagttggccgagaacgattatcgactgctgaacgagtatacctacaatcgccagatcaagcagttgggtagtgacgtcgatcaggccaagatggccctggaacgcacccaggcgaaggcccgggccgacgtggttcagtcagaagcggatttcaaagccaaggagcaggaattcaatcgtcagcagaccaggctcgccaagctgctggatcagatcggcaaagcgaaggtctacgccccggccgatgggatggtgatctacgcgacgaccgccaaacgcgggggctggcgtgataaccggcagccgttggatgagggcgtcgaagtctacgagcgtcaggagttgatctatctgccgacggccgattcggcgatggcggaggtggatatccatgaagcgagtctggagaaggtcaaagttggccttcccgccatcattacggtcgatgccttgcctggccaacggtttatgggcacggtcggtcgcatcgctccgctgccggattcggcgagcatgtggatgaatccggatctgaaagtctacaactcagatgtgtatctggaggatgaatcggaggaattgcgcaccggcatgagctgcaaggtcaatatcgttgtcgcgcagtaccaggacgcggtctacgtgcccgtgcaggcggtgattcgggtggccggtcagcccaccgtctacgttgtcaaggaggatgggacgatcgaggagcgaacggtggagatcggtctcgacgacaacaagatggtcgtgatcgagagtggtttggacgagggggagatcgtgtggctgacgcctccgctgaagtccgccagcgtggagtccggctcggaaggcatgctgggtggggtcagggacgccaatggtgtctccgatggcatcacgcagcagatcagtgacaagctcaaagccgccaatgaggccaagcccgaagcgcctcaggttggcgaggaggggcaggagggctctaaggggccggcctcgaagcagatggaagatatgcgcaagggtatgcagaacatgacggccgagcagcgcaaagaggtcatgaagcgcatacagaatatgacgccggaacagaaggcgcagttgcagaaggcgatgcaaggtgcggccgcgggcggccagggaggtcgcggcaggccccaggggcagggcggacaacccggcggcaggccggccggacgccccagaccgccgcagggcggcgccagagggggtcagtagatggctgaccaagccccttccagcgatcattccgatattgtcaagctcgtcgaggcgcgcaagacctaccagatggggaccgaggaagtccgggctctggccggtgtggacatcgccttcgaaaagggcagcttctgggcgatcatgggaccgagtggatcgggtaagagcaccatgatgaacgtcctggggtgcctggatcgcctgacctccggctcctattacctcgataatcaagatgtcagccagatggatgacgattcgctcagcgaactgcggctcaaatatctgggattcatcttccagagtttcaatctgattccccagttgtccgttcagcggaacatcgagctacccctctactacctgggttgggatgccattcgcagcgctgagcgagcgaaggaactggccgaggaggtcggactgggcgatcgcctgaaccatcgaccgacggagctttccggcggacagatgcagcgcgtggctgtggcccgggcgctggccaacgatccccacatcatttttgccgatgagcctacaggcaatctcgactccgtcacgggcgtccagatcatgcagttgttgagcaaattgaacgagcagggcaagaccgtcgtcatggtgacgcatgagcccgatatcgcgacctacgccgagaatcggttgcacatgatcgatggcgtgatcgatagaatagaaacaggtgcgcatgagacagacgaagatcgccaggaatatctggctcggcattgagaatctgctgctccacaaactgcgttcgttcttgaccatgctgggtgtggtctttggcgtgggcagtgtggtggccatgctctcggtcggtgagggcgccagccaggaggccctggctaatatccgcaagctgggcagcgacaacatcattattacatcggtcaagtcggtcgaggatgagcagtccagcacgcagcattcgcacatgagtatctacggcctgacctatgacgaccaggaccggattcgcgatagttttgcacgcattcgcaagacggcgccggtcaagctgatgcgcaaggagacccggctgcgcgagcgcgccatggagctgcgcgtggtggggacgacgcccgaatggttcgcgctggtgccgcgtgatattatcgccgggcgcgtgatcgtctcggccgatcagcgcaaacaggccccggtggcggtgctgaccgagtttggggcccgcaagatcctggccaccgagagcacgatcggtcagaccgttcgcatcggcggggatgagtttgagatcatcggcatcgtccagagtgagagcggccaggcgggaaacattcagatccctgacgaagacgtggacatctatatccctctggaagtcgcccgcgactacttcggtgatatgtttaccaagcggacctccggttcgttcgagcgggagaaagtgcagttgcaccagatcattgtccaggccgatggtcccgacgctgtggagtccaccgccgcgggtatcgagcggatgttggagcgctttcacaagaagaaggactacacgatgagcgtccctctggcgctgctcaagcaggccgaggcgaccaagcgaacgttcaatatcgtcctcggttcgatcgccggaatcagtttgcttgtcggtggcatcggcatcatgaacatcatgttggcctcggtgaccgagcgtacccgggagatcggtatccgccgggcgatcggcgccaagcgtcgccagatcatctatcagttcctgattgagacggtcgtgctctcgatgtttggcgggttgatcggtctgggtgtgggcaccttgatacctttcctgattacctacttctccggcatggtcacggtcgtgaccctggacggcatccttctgcccctgttcatcagcatggcaattgggatcctgttcggtctgtatccggccatgaacgcggcgcgggtcgacccgatcattgccctgcggcacgagtaaggtgtttggtgggccgtctgccgaaacggacggacctatgctgagctaactggttgcgggaggatgtgcgcatgagacagaccaagatcgcacgaaacatctggctcggcattgagaacctgttgctccacaagctgcgctcgttcctgacgatgctcggtgtcgtgttcggggtcggcagtgtggtggcgatgctctcggtgggcgaaggcgccagcaaagaagccatggcgcagatccgcaagctgggcagcaacaatatcatcgtctcctcagtcaagccggccgaagatgaagcggccaatactcagcggtcgatgatgagcatcttcggactgacctacgacgattacgagcgggtcgccgacagttttgggacaattcgtcaggtcactccggtaaagttgacgcgtaaggaaacgcgcctccgcgagcgatcgatggagctgcgcgtggtcgggacaaccccggaatggttcaaactggtgccccgtgagattctagccggtcgcgtgatcatgccgggcgatcagaccaaactggcgccggtagtcgtgctgaccgaattcggcgcgcgcaagatcctggccaccgaaagcgtcatcgggcagaccgttcgcattgggggcgatgagttcgagattgtgggcattgtcaagagtgagagcggagaggccggcagtatccagatccccgacctgcaggtcgatgcctatgttcccattgaagtcgcccgtcggtactttggtgatatattctccaagatgacctccggctcgtttcagcgggagaaggtggaattgcaccagatcatcgtccaggtcgacaaggccgaccacgtcgaagcgacggcggccggcattgagcggatgctggagcggtttcacaagaaaaaagactacaccatgagcgtccctctggctctgctcaaacaggccgaggcgaccaaacgaacgttcaacatcgttctcggttcaatcgcgggaatcagcctgctcgttggggggatcgggatcatgaacatcatgctggcctcggtgaccgaacgcacccgggagatcggcatccgtcgagcgatcggcgccaagcgccgtcagatcatctaccagtttctcattgaaacggttgtgctctcgaccatcggcggattgatcggcctgggcgtgggcaccctgatcccgctcctgatcacctacttctcggggatggcgaccgtgatgactctgaacgggattctgttgcccctgttcatcagtatgggcattgggattctcttcggtctctacccggccattaacgccgccaaggtcgatcccattgtcgccctgcgccacgaataggagcgccggcgctgatctgaggaatgcgcgacagaacgcgtaaccttctctgggcagggtcccactaccctgaggacaagacataagtctgaaagaagtcgtcaatagattgtaaccggcttccgtgcgggctcactgtatgcgggaggcggttccgtgggggatcgccttcgtgttggagtaacggtctgatgtttctcccaaaggagacttgcgtcaggaccggcgtggtcgaacaaggatgctgaaaggagtgacagatggcaagaagggcgatggtcggtctggttacggtggtgatgctaatggttgtgggatcgctcatggcccagccaccgtcgctagcgcggcccgtcccctcaacggttgggcgtgtgcctgtcgccgatgtcctccgacgactgggggcgaagcttgagcagggagcggcgaccaaggagtccgacgattacgcaagtcatttcaaccggctggacataaaccgagatgggaggcacacgagggcagaatacgtcgagaagggcagctacatgacccctcaggcgcgggcgggcatttttcgagccgccgatggcaatgccgacggaattgtcaccaaagctgagtatgttttgaaccggatcattactgatgaagccaaagcgatcgttcaggggatggacgatgataaggacggtttggtggagcgagcggagttcgtcgagcatgcggcgaaactgctttccgatcctaagttagccaggcaggtttacgcggcactggatacgaacgctgacggcgggattcccatgcccgagtatctgcgcgtgtgggggcagtgggcgcgggttggacgaaagtcggctgaacagcgcctcgcggtgcgacaggtggaattcacggattttgcgagccgacccggtcaacagccggatcgtccacgcggcccgcgggggatgggacagttcatggagagcaaacctgccctggccaagacggatttcgagaagaaggtcctggcggtgctggatgatatggacagaaaccagcggcgcggcaatatgaacgtgcccatccaggacggtcgactcctccgacttctggccgagacaatcggcgccaagcatatcgttgagttcggcacctcgaacggctattcggggatatggcaatgcctggccctcaagactaccgggggcaggctcactacctttgagatcgatgctcgacgcgccgctatggcgcgggagaactttacgaaggccggggtgggcgatcttgtcacgctcatcgagggggacgcgcacgagaaggtggtcgaggtcaaaggtcctgtcgatatggtctttctggatgcggacaaggaaggctacgtcgactacctgaacaagctgttgcccaaggttcgtccgggcggtttgataatcgcccacaacatgaacgcgcgtcaggccgatcctcgctttgttgaggtgatcaccacgaacccggacctggagacgatctttctcaacggcgtcggtctgacgctcaagaagcgtagtctgccctagagagacgatgtcgaacatgcgtgacatggtcgaccagcgatcttccttcacgagggtggtgccgatgtgatggcgccggccaggccggctgccttggaatagccgcatcggcacccctttttttcttcacggggagtgctagggatgaataggcaggcagtcgcagtagttgtcacgttgctgttgtgtgctcaagcggtttcggcctcggattggcccggtttccgaggacccggcgctaccggtatcagcgacgagactcatcttccgattgcgtggagcgaaacagagaatctgaagtggaagcgctcgcttcctggttccggttcgtccagtccgattgtcagtgggaagcgtctcttcgtaacctgctactcgggatacggccttgacgatcgcagccctggcaaaccagaagaactgaagcggcacctgctctgcctcagcgcggttgatggcgcggtcctgtggcataaaacagtggacgcggctctccccgaggatccctatcgcggttacatcagcgagcatggctacgccagcagcacgccggtcaccgatggacagcacgtgtacgttttcttcgggaaatcgggtgttctggccttcgatttcgagggcaaccagctctggcgcagagccctcgggaccgagtccagcaatcggcggtggggttcggcctccagtccgattctctatgagaaccttctcatcgttaacgcctcggaagagagccggaccctgatggcgatgaacaaactgacgggcgatgaggtgtggaaggtcgaagcggacaagaccgagttgtcgttcgcgacgcctgtgatcgtcaaactcgccgatggccgggaggagttggtcctggctgttccctcggagatctgggcgttcgagcctatgactggaacgctgaattggtatgcacggacgacgctgggtggaaacatctctccgactccggcggtggccgatgggatgctctacatctttggcggtttcccttccaccgaggcggtcgctctccgcgccggcggcaaggacgacgtcaccgaaacccacatcgcctggaccagtcgcgacgcgtcgtatgtcccgtccccactggtgcacgatagacacctgtactgggtcagcgacaagggacgcgctttttgcgccgaggcgaagacaggtaagatcctttttgaggagaagctgccggtcaaggggggcaagcccttctatgcctcggttgtcctggccgagagccggctgtacgccgtcagtcgcacgggtggtacgttcgttctggccgccaagccgaagttcgagcaactcgcgcacaatcgcttcgtatcggacgacagcgatttcaacgccagtcccgccatcagcaatggcagaatcttcctccgctcaaaccgtttcttgtactgcattgccacgccctgacaccatcaccctcgacatgtccatccatgcaggctatgccctctctacaaggggcatggcccgatttctcttacggattcacgactccccacgattcggcgagagaaccacggcaaaatctgcgcgacgaagaattggagtaaccgatccggtcagaggcgtcacaagtatggtgaaatgattactggataatgcggaggtgtgccatgagaatcagcgtatggtttgtgttgtcgaccgtgttccttttcgtatccccgagcttcgctcaagatgaagacttctacgatgagaccgtgctgaggaccctccatctggagttcgccgaacccgactggtggcgccagttggaggccaactatgacgcaaaggagaacattctcgccactttgactgtcgacgaggtcgtttgcgagagtgtcggcgtccgatttcgagggaatacgtcataccggatggccggagactcacaaaagaagtccttcaatatcgagatcgactatgccgttgaggatcagcgcctcatgggctacaagacgctcaatctgatcaactgctggggggacgccaccttcatgcgcgaggtgctgtactcgaacacggctcgcaggcaggtccccagcgccaaggccaacttcgtgcgtctcgagatcaacggcgagaactggggcgtttacgccaacgtccagcagctcaatgccgagttcattgaggactggttcgcgagtaacgaggggacacgctggcgcgcccaaggcacgatgggtggcggcgctcccggcccggacggaggaggccctcggcccgttcctcgggcggtcgatgagagtgatgatggattgcctctgtccgaagagggtggcgtcaccagtggcgtggcggcgctgacctggcagggcggcgattcagccacctacgaagcggcctacgagctcaagaataccaatcaggaagagccctgggcgagtctcattcacacgtgcgatgtcttgaacaatacgccgctggcgcaactgcccgacgcactagattctgtgctcgatgtggaccgagccctgtgggtttgcgcgttcgagatcatctttcaggatgacgacggctatgtcaacaagcggggcagtgactatggtctctactacgagcctgagaccggtcgattgcacctgatgcagtacgatggcaatgagtgcatgtctaatgagcggtggtccttgttctaccgggacgacgacccggtggtgcctttgatgcaccgcttgctggccatcgaccagtaccgacagcgctacctggcgcacgcccgcaccattctcgagtccttcctgacggaggaggcccttttcgcgaagatcgacgcctatcgcacgctcatagaggatgaagtgaagctcgacgacaagaagcggaattccagccaggccttcgaaagtggtgttgagggcttgaaggatttcgtgcagaggcggcgcgactatctgctgaccaaccgggcactcactcgatcggtccccgagatcgtaggcgtcgagcaggaggctgtcctgaatgatgacggcgagacgcttacggtgacggcgaccatcggcgactctgttgctgtttcagaggtgcgattgttcgtggcgtccggcccgtttgcccttttcgagtcggtccctatggtggatgacggcctaaacggtgacggacaagcttccgatggtgtttggggtgcgagtctctctggttatctatcgggttcgcaactgcgttactacgtacaggcgacctccgatgacggcaacggcaccgtgacattcaacccccccccgcgccgagcatgaggtctacacgcacgtcatgacctattccgatgccgcgttttcttcgatcgtcttcaacgaactcatggcgcggaacgatacgacgctggccgatccgcagggtgagtatgacgactggattgagttgaagaacatcggcgaccagaccgttgacctggccgggatgtacctcagcgacaacccggacaatccgctcaagtggcaattcccggaagggactctggtcgagccgggcgggtatctgctcgtctgggcggatgaggacgggagcgatgagccgggcctgcacgccaatttccgattggccggcgatggcgaaacagtctggttgttcgatacgatcgaacagggtcatgctctcctggattccgtgacatttgaggatctggatgaggatcaatgcagcgggcgttcccccgacggtgaggggcccatgcaggtgctgtctgtgccttcgcctctaggtcccaacccgatgccggtagcagcgggagacagtccgtagggccatcgacacccaactgcggcttggcgcattggatacgtcagaccgcagtattgcggattggggcggcgcgcgatatgatcctggtgtgacattcgtttggattgccaaccgggatcgttgaaggggtatgactgatgatgcgaatcaaggcgatcatcttaataggtttctgctgtgccgcggcgtcctgggccggcgaagtagcgaaccccgaccccaatcgattcgccaaggatatcaagactttcatggcgtgggacagcaagaatgctgtgcccgtcgattcgattctcttcgtcggcagttccagcattcgcatgtggaagacacgggagtcttttccggacctgcccgtgatcaatcgaggtttcggcggttcgcacatctccgacgtgatccatttttccgagcatatcgttctgccttatgcaccgaaactcatcgttttttacgccggcgacaacgacgtggcgggccgcaaatccgccagtcgcgtcctgtgcgactatcgtcgttttgtcgaattggtccacaccaaactgcctgacacctcgatcatcttcatcccgatcaaacccagtggaagtcgctggtcgctttgggcccagatgaagaaggccaacgatctcattgaggcattctcggggaaggactcacgcctgttttttgcggacctggcgacgccacttctcaacgctgagggcaaacccgacgacggtttcttcctgggcgacagacttcatctcaatgaccgggggtaccaagcctggaaccgcgcactgcggcctgcgatcgagaaggccctggacgcgcatgctgcacgcaaatccggacgttagacatctaccgagagccctgcagcccgccgctgaccgggcaattctctggacaaaggaaggcggatttgttacaatacaggtttgggtgtgagtgatgcttcttgtcttgtcctcgttgggatggggagccgcagttgaggtcgttcaaaacgccggaaacgccactcagggggcaaagaatcggcttcaaacgaggaaaatcggggaaaaagcgttacaaactgcatttcggatggcactaaccagagactgttaaacatccgatttccaggtaattttttcggaggaggttacgcatgtactgccgaccccatcatgtgtctgtactgatcgcactaatgtgtctatctgtaatcccggccaccgtgttcggtaggacgttagaggtggaaagcaccggcaaggtcggctacgccagtattcaggcggcagtggatgcggcggtcgacggcgacaccattgtcattcatccgggcacctatacaggctacggcaactgtgacatccgtctgcagcgtaaggccatcgatattcgcagcgccgacccggaagaccccagcgttgtcgagacgacgatcatcgattgccaggggaccgctggtgtatcccatcggggtttctacgtgactgattttgccggagagatttccggcctgaccattacgaacggactggcttccgtcggcggcgccatttactgtgagaacactacgctcgtgctgtcgttctgtcggatagtggacaacgctacgttgcccggtggggtcaaggtcggggtcgacggtggctccggcggcggtctttacggcgttgcttcggctatcgagatcatggactgtttgattagcggcaacgctaccggggccggggcagagtcccgagtgagcgccgggggtgacggtggtgacggcgccggcctgtacgcgcgggattcggtcgtatacgtatcggactccacgatggttgacaatatcaccggtgctgggggcagttccgatatttttgcgggaagcggtggcaccggcggcgccgttcgctgtgactcgctggtcttgacccatacgaccatcgccaacaacatcaccggcgccgggggcagcggtcccatcggaggccatggcggtctgggggcgggtctctattgcatgcgggctacgatcgaaaggagtgtcatccagggcaacaccgccggggccggtggagagagtacggacttcgccaagggcgccggcggtcagggtggttccggcggcggcgtgttctgtcaggattcgctggagatcgcggactcgctcgtggccggtaaccggtgtggtcgaggcggcactgccgcaacggccggcgccgacggtcggggtggaggaatctggtgcgcccttggtcgcattgaccattgcaccatcgccgagaatgcttctattcagcaaagggcgggcgtggccggccagggggcgggcgttttttgctcggccgatacggtgatcacaagctccatcctgtggggcaatatcccggaccagttggccggtcagaattgtgacaatgtgacctactgcaatattgaggggaacacctgcccggccagtggcggcgttctctctgacgatccgcttttcgtccagttcggtcaatgggccgattcgactggttccaaggcgaccgttgagcctggcgatcccacggcggtctggacggcgggtgactatcgtctttccgatgggtcaccctgtatcgacgcaggcgatcccgactatcgctacgatccgaatcgaatggacatcgacggtaatccccgcgcctccggagcggccgttgacatgggtgcttacgaggtccagagtctcgcgccggtgtatcgcttctggtcgccgaagacaggcagctacctttacaccgctgtcgaagccgaaaaggacaggatcatcgaagtgtattcggagtcatggaccttcgaaggtgttgcttattacgcctatctccgcgccacccaggcaggtctgatgcctgtctatcggttctggtcggacaagcttggcagtcatttttacaccatagatgaggccgagagagacaagatcctctcccagcaggctcatgcctggacgtatgaaggctcggtcttctacgcctatcccgtgggcggtcagccgcacggggccaaacctgtctatcggttctggtcggacaaggtgggcgcccatttctacacgattgatgaggctgaaaggcagtggttcatagacacgctggccgatgcctggacatacgagggggttgtttggtatgccttcgacgagccggggattggtgagacgccgggcctgccggacgagacgaccctctacgaattcagtgccgggcctgacgccgcctcgtacgggctcgtgctcaaagcctatctggatggccaggaggcccggatcgacaatccgaatctggagttcatccccgccagaagccagatgcagatggctgtcaacgccaaagccatgacggcggagctgacggaattccacatcgaaagtgagttcctgcagtacaccggcacggccaaccagattggcgggacgatcgcgattccgttctccctctacgtaagcgggttcttcgacacgacggcgccgagaggtccctacgccatcgatccgaagacgcagtccttccccacaggcctcgaaaccggcgctgtggctgccggggaggcctacgcggtcgtcggctcgggcgtcgtggagggcgagaagtttgatgtgaacctggtcctgagcccaacagatttcctgatggatggcgtggccacgtttgatggtctcaacggtaccgatcgcctggacgtgaacatggccggtcccttccagtggtatcgccagcagcaggaagatctcttgatggaaaccacgtttaagggacacgtgctgcaactttatgtcacctcggcccgaattcgaaccacgggtctctgggcaggaaagcgtgttcctgacgctgaaaagacagaaaaatagttctttgcgcgcgttgttacgctgcgataattctgggttcttggtagtttttctccgggccgcttgccagaggcaggcggcctggggtataatcagactgccgatgcgggcggggcaggaatgtcaactatatgatgcggacggctgctggtcgggaatgcagacctccgtgtgaggagaacgcagcatcatgacacgcacctctagggctttcactctaatcgaattgttggtggtcattgctattatcgccattctgatggccattctgatgccggcgttgcagcgcgtcaaagatcaggcgcgagaccaggcctgtcggggcaatctcaagagcgtgggcctgggcgtcatgatgtatttgcaggacttcaattttgtgatgcccgacatgcatacgcatacgggcaacacgaatggccatctctggtgggacaccgccggcaatccgttgcgggccggtgacaatcaggcctactggggtatcgcctactatccgtatatcgaggatcgggaggtcttcggctgcccagctttccgcacctttgccgagaccatcgccaaggaaatgctttacggaggcgaccccaagctgatttacacctccgccttcggcgccaacgggtggttgaccaaggagaatacgatccgcattaagcgtcattccgaggtcatcgtcgcgcacgaccacatggaaccgcggattgagaacggcgacagggacatgctcttcgccggtcccggtgggacgaacctgacgcactatcgccagagcgggggccgctccgactggtatcgaggcatcttccggcacaacatccgctccctcaatgatttcgagaccgccggcaccctgaatatcatctggctcgatggtcacgtcacttctctgcgtgagacgaccggcgaagacgtcctgcaacgctggtacgatcccctcaagaagaacttgtagtcggctttctctgagttgcgcgccaacgcgatcaaggcgtcccatcgatatctctattccacttcgggactgatctgattccccgccgtgagactgggttgcgcatttggcaggcgaggctctcgcttacgtggtctctatggctcaagaggaatccgccgcctaaccgaagcattcggtacgtgggggggggcttgatccacgtagcttgttgtggagatcaaccgaccgagttggtgcgtcgtcttaggatcagcaacgttgcgagtatcgctaacacccccaggagaagcccccagatcggggccagcccgagactgctggggatgtacgccatggtcaacgcgatcgctgcgatgagaaggctgtagggcagttgcgtccggacgtgctggacgagatcgcacgaactggcgatcgaactcatgatcgtcgtgtcggagatgggggagcagtggtcgccaaagatggcgccgtcgaggaccgcacccaggctgatcattgtcgtcagtccataggtctgtccgtcgatggcgtaggcgatggggatcgctgtgggcatgaggatcgccatggttccgtagctggttcccgtggcgaacgacgtcagcgaggcgaccaggaagaggatcggtgggaacatgtaaggctggacccggtcggccaggatggtcgccaggaattcgcccgttcctagcgtgtcgcagcagttcttgagcgaccaggccatgatgagaatcacgaacgggatcatcgcccgccggatgcctcgcttgaagcactggacgatcacgggccggctcagcgaaccgcacagttgcgagaagatcagcgccagggtcagcccgaacgaggaggcgcacgccagacagagtggtgtgtgcgtggcgtggccgatcacctcgcgccagtagatccaactgcccggcgagagggtctcgatatcgacgggcttggccggcatctcctccagggcggtcgtctggctcagcgtctgccattgctgcatgtcatctttcagggtggcggtcccatcgaaccagagccctgtgaagtgaaagagcactaggcccgccagtggaaccagtgctttgaaggcccggtccgagcgattggccgatggggtcggtcctacctcttgtgacgccgcatccttgtcgccaggctcattcgccagcgctgtcttctgagcggtcttcatgggcccgaagtcacagtccaggaggatgtgcaggaaaacgaacgcgatcatcagcaggcagtagaagcggaagctcagggcgtcgaagaacatggcgtatccgctcttaccgatgccgagcgtgccgccgatttgcccgagaagaccgacctcgaaagcgatccacgtgctgacgacggccagtcccgcgatgggcgcgctggtggcatcgacgagaaacgccagtttctctcggctgatgcgaaaccggtcggtgatcggctgcatcatcgacccgacgacgatggcgttggtgtagtcgtcgatgaagcacaggatgcccatcagtgcggtggccgcttgagcggacttgcgccccttgatccacctcaggagccagacgatgatccctcgaaacccgcccgaggcgataagtatctcgatcatcacaaagatcggtgggatgaacgcgagaatctggaggtaggtgacgtctgtgaccgtggccgtgacgtgggtggccgatgtcttgaagccctcgaaccaggctccggcgctcaatggagtcggcggaacgtggctgagcaggccgcctgtgaggatggcgattcctagactgggcaggacgcgacgcgtcagaaaggccagtacgatggctagcaggggggggatcacgctgtaccagactgccccagtctcggtttcctcggcccgcccgaaccaggcggccagggcgcatactccggcgaagacagtcgcggctgctgcaattttggtgtatcggcttgctttcaatggactcccggcactgatgggtcgatttgcagccgtcggtacgaatcggcgcccggcggcgtgactgtcaccagcattttcccgaaaaaggcccacaaatcaagtccaaatgtgttagttcgacgcgaagggtcttctgattggacggcgcggctaagctggcccccgcgcgccaccgttccgatcgcgacccgtggcgtgggtcctatatcctcggcgatggtggtccacactggctggttgtgtgcgtcgtggcggggcgccgaacgttgcgggcgatgtcggaaaggccagcctcgacaggggctatggggccggtcactggcggacttgcaggtaaaatctgcgttatcagtactagtatctgggttttgtgcttgcatgttcccgccgtcattcataaattgaatagtgatagcgaggtggaacgcctgggtctgggtggcggagcacacggtggtttgaggttgtaggagtgcaaggaatgaaggtggtcttgttcgtagtgctcgcgttcacgcttcttctgggtggttgccattccacaaatcgcaagggcctaatccaggccggatacgctcctgagtacgttgacggctatgtggatggctattcggcgggatgccacacaattggccatcccttctatcgcttcgaaagaaacacctctcgatacgaagaagaccatcagtacaagaggggatgggaagacggtttcacgattgcacgctgtgattacgccgccgtgtggtaggagaggggccggctcaaggggttattcatttcattgagtgttcagcgctgtcgcagatgttctccagattgcccatagacgccgccgcagacgggtggcgcaggttttttcgtccacttatgtttgtcaaagcgacgcgcgttcggagcgtgcgcgggccaagcgcggccttcccgggagaggctgctgccgcgccaacgtgttggtcaggcggcaatgggcgctcgcccgctgtgagattctgcggtttgtaggttcctggtaggccgtctacaggagcaccacctggtcttcctcttcaatgggttcttgcactggttggccttgaggtttgacggagacttggattccttccgggctctcgcaggcatcgagaggcgaccagcgactcttggccttcttgacgatctcgatcagtcggccaatcacggtatccggcgtgtcgtcaaacgggtcgacgacgaggcccttcagttcttcgaacaactcatcagatactttgaccgttctcatggtcttcctcccatcaacggggcgattcgttcctggtgtcgcacgccggaggcgtacgcatttgtgctacctaaacaatagaaacaaaccgacccgttgcccaactcgctaggatcccctcgtggagaaatgagtcttttgcgtcgatccccagggggaatctctgcacgtgaggattcagtattgtggtaactacgtatttttgccttttccccaagatgtgaaggatttgttcttaacctccgtccaattccatcgagaacaagcatggcaaagcaacggtccttttccggggcctggctggacgatcgagatgcgctgagacgcgtcgttatacgtcatcggtctggatgagaaagccggctcgatggcgaattggtgcgccttgagcatcttcgcagcggtgcgtggccccggagtgatctcgacggcgttgtgaatctgtatctgtcagggaggctcgatgaagccgaatggaatccaggatacagcggagaagacaaggtatcgcatcgaggtcgccagctcgaaggatctcggggagcttgtcaggatgcaaatggccctgcaagagagtatggctggggtcgggacgaatatgctgcatctgaatcgcgatagtgttgttcgactctatgactattatcaacagcagatcggcgacgaccaggcgcggttgctggttgcctgcgacagtccgtccgagcagatcgtggccatgggatcgggccggatctggcggcatgcagactatgtcccggctcgctccggcgagttgatcgatctttgggtcgagccggatcacaggcgacggggattggcgggacgcatcgtcagcagtctcctcaagtttttcagggctaaccgggtcgagtttctggccgtcaactacgtgcggagcaatccgggggccgaggcgttgtggaagaagcttggttttcgccctatgctcatcacagcaacagccgatcgtcgtacggccgaagcggtgatgggcgcggagtcccggcgcattgtctccgttgcccgcggggcgacggtgggcgagcaaccggcttacgccggcatgagtctgtcgggatgacccggcccgtgtggaccggaccatccgcaagagcgatgcgctgccctctggctaagcgtagggcaagttgagaatcgaattaaccaggatcaccaccacggcggccgcgatggtcagccggccgctggcatgcttggaccgggtccaggagagcaatcccagagtcaaggccaccaggcccaatatattagcgacggccaggaatatcgcgatatcaccgataacgtccggttgggcctgcgcggcgaccaggcgaacgcggttagctccctggctgatgagtccccacggtacggcgccttcggctacctcgttttcctggttggcgttgttgtagttgcacgcactgcctgttgccagaagcgcctgcccgctgatgaaaacccaggcgagcacaaccagcacgagacttctcgtttgtcggttcttcttgcttctatgtgatagagacatctcgtcccccccttagtcgtcatggacggctatgtgaattcagatgtgttctcggttcggttcgtcatcgccatctgtccagacatacttcaactgtgcccatgtaaactatgcgaactgtgaaacgtttgggcaagtggacgtcccattcgatggcctcgcgcgatgtgtatcggtgtcgttaccgggccttgcggccggtctatttgcgcgcgaaccggattcccggggcgatggcgggtttatgagggttgtgaaggcgtcgtggccgacacctggggattgttgtccgagaattgccccagatgcgaggcccagtcagccatttgggcaacctggggcatgccattcaggaaagtctgcaggttttccatgtcctgcatgatatatcggacgatgtcccgaagttggccggtcatggcgatctgctcggtctgtagccgcgccagttcggcgcggaccgcgaccgcgatgtccgtttgcgtgacgattccgctaacctcgttgtcgaccatgacggtaagccggtgaaggtgcatctggtccatcttgatgcccgcactgaggaccgagcagtccagcggaatcgagatcatggggaatgacattatatcgacgacctgcgtttgggcgggatcccgacggagggccacaacgcggcggagcacgtccttctcggtgacaatgccggctgcgcctttgtggtgggtcgcaaccagacacgaaacacctcgagacgtcatgatctgagccgcttcggccaccgacgcgccggtattgaccgtgacgacgtcggtgctcataatctgggatacggctttgaggggactgatggagatcagacctctggtgatatccgtctgtgtggcgatgcccacgagtcgaccggcgtctacgaccggcagacgcttgatgcctttgacttccatggttttgccggccgctatcaccggcgtgtcgggtgagacgacctctacaggactcgacatccgatcgcccacgcacaggcggtgaaattctacattggaaccggcgacccctttgagtacatccttgtcggtgagaatgccgatcaccatctcatcgtcaaccacaatgacacaggagatactgttatccgacatcttcttgacggcggaaaagacagtgtcatcagaggttacggtgatcatctcgcaattcatgatgtcgcgcatccgcaggtcccgacgaccctcttggcgggggcgacaagagagctgctccgattctgcgatcagtggagggatctgtgtgatgtatgccatcggtgtattcctctaacaagcctgtgtttttcagcacgcgcctcgtttgcgtttgaccaaggtgatcaccaggtgctcaagcaatactatcggtgtttgcaggctgaggcttagccgaaagctgccctgattgggcatcttacgccacaaaatacgtatttccccttagtcgtgccgtcggacaaggatttccgtttttgcccggattctatttgacagatcttgcttgattttgtacactagccaacaaacttctgccggtgtcgatcttgagtagtcaaccatcaacgatccgctgaaacggggagttggtcatgatcagggaacctgccgccttcctcggcgagagacccagcgtcgggagtactgtcgccctcagcttgggcgattatgcgaaacaaagccaattctcagtggtctatatgaaggctaaagtatgttgcgaaaatgggttacatggattatgcttgaagccggcgccggaaaacaaacccaatttccagggcaaacgtaacgtctttcaatgagatttcgatagtgaaagaggatcgaggggcagggcgtgagtgatttcgaaaaggccaaagaccttctataccggttcaggggggattcgtatctgtgtgggaccgatgtcctgtctcgggtcggggccatggtcggtcgtgtgggccatcgggcggcgctggttcgcgggacgtttcgtcggagtgatgactatgtccgcatgatatgcgagtcgctgacccgggccggggtgtgtctctgtggggaaatcaagggggctcggaccaatgcgccgagagaggacatgactcggatcgcgcaggaattgcacaaggcggcgcccgatgtcatcgtcagtttcggcgggggaagcaccatcgacgccacgaaggcggccaacgtactcggcgtcctcggtggcggcatcgacgattacttcggtctggggcgggtcaccgaagggcttcgccaggcggatcgggtcctggcctcacacgttgccatccaaaccttggccggctctgcggcccatctgacgaagtacgcgaacatcaccgacctggcgagcagtcagaagaagttgatcgtcgacgaagccatcgttcccaatcaggcggtgttcgaccatggagtcaccagcgatgtgccggcggacctgaccgccgatggagcgctcgatggcgtctcccatatactggaagtgctctacggcgccgtgggcaagccttgttatgagacggtggccgagattgcccaggtggggctgggcttgattctcgaacatttaccgcgcgcgatgtcggaaccctgcgatatccaggctcgagaggccctgtctctggctacggatctgggtggatacgcgatcatgatcggcggaacgaacgggggacacctgacgagcttttcgcttgtcgacattctgtcgcacgggcgtgcgtgtgccgtgatgaatccgtactacacggtcctctttgctccggcgatcgagaagccgcttcgattggtcggcggcctctatcgacgagcgggtctgacggacactgacttcgagaccttgcagggcagagaccttgggattgccgttgccgaggtgatgctggctttcgcccgcgagattgggtttcccacgcgactggccgatatcgacggttttgctccctcgcacatcgaacgggccctgacggcggccaaagacccgcagttggccatgaagctgcagagcatgccaatccctctgacgaccgagatggtggatgactacatgggcgccgtactggaggccgcccgggtgggcaagctggagatagtcaggaatgtgccggggaaaggtgagtgccgatgaagattgtggtcgccatggattcgttcaagggaacgctcactgcagcgagggcctgtgctattgtcgccgaggcgatcgcgtcggaaatgcccgaagcgcagattgctgtcaggccgatggccgacggcggggagggaaccgctgccgctttgatggcggccgccgacggacgctggatcgagaagaaggtgatggggccgttgccgcaaatgcaggttgatgcgggttttgtctggttgccgagcgaccggaccgccgtggtggaaatggcctcggccagtggcctccagctgctcgacgacgagcagcggaatcccttgaacacgactacttatggcgctggtgaacttgtcgatgctgcggcgcggtatggagcccggcggactttgcttgcggttggaggcagtgctacagtcgatggcggcgtcggggccgcgatggccttgggctggcgtttcctggcgaacgaggggcggataatcccgctcggcggcggtcacctcgggcaaatcaccgagattgacccgccgcaggggggcatggatgttcctgtggaggtgctttgcgacgtggataatcccctgtgtggcccgcatggggccgctcttgtatacggtccccaaaagggcgctacgcccgaaatggttgagacccttgatgccgctctggctcatctggccggactagtcagagattggctcgggatggatgtcagggagctccccggggcgggtgccgccgggggactggcggccggcgccgtagcgttcatgggggcgcgtctcgtttcgggggttgaggttgtcatggatcgggtggagcttcgtcaagctgttgcggatgccgactgggtcattacgggcgagggctgcttcgatcgccagtctctgcgaggaaaggtggtctccggggtcgcgcgagtttctggccaggccggcgccaaggtggcggtccttgcaggtcgcgtgctcctgccgcttccggcacagagaacgctcggaatcgaggcttcggttgcctgcatggagggcgctatgacgctccaacatgccctggcgcacagcgaggaacttctcggtcaggcggcctgtcggttcgcacgcatgcatctggcccgttgaatggacagatccgatgggagtctgcggtcgaggatgtgtccgggtttcggtcagaatcttcttggcttctggcccgttttgatgtaaaatggggaaaccgtggaatatagtgtattcagcaactatcgtgctctcaggagaggggtactggatgagtaaatatctgttttatgggacatttctggtcgtcgcggtcaatctctgtatggcggcgccggagccggccattgtccaggggcctgggcattggaccgtcgaggtcaaattcgagcaaccgcagcaactcgtgctgccatggggcggcaacggtgcgacgcggtattggtacacgattctcagcgtgaccaaccggacgaatcaggatgtcgatttctacccgcgatgcgagttgatgaccaacacgttccaaatcgtcccggccggaagaaacgtgcccccggtggtgttcgagcggatcaagcagcgccatcagagccggtatccgcttctcgaaacgctggagcgtgcgaataatcgcatcctccagggtgaggacaatgccaaggatatcgcggtcatctggcgcgacttcgacatacgggccacaggcttcaaggtgttcattaccggtctgagtaacgagaccgcggtggtgaaccacccgatagcagtggacagtgctgggacgccggtcaaggtgttcttgcggaagaccctggaattggactacgccttcaggggcgatcctaccttgagggactcggtcgaggttgtctacaaggacaaggcctgggtcatgcggtagtgagtcggttagcgtccggcgttggagttgtgacaccggcaggggggcgcaacgcgtcttgctatcgcttccccagcgtgcgtagccgctgaatcagttgcggcagtgcatcgtaacgattcagacggattcccaaggcgccgcccccggagtggagttccacgaactctggaaccggggcaaggccaaaacgccggtagaacgcgcgcttcaagaattccttcacctcgcctgcgctagccttgtgcgtgtccacgtgtacctggaaatagtccccttgtcccgctgcattcacacgcacggccactgtctccgggccgaacgctcgcttgagcatcgcttcggccaggtcgatcaaggccagtccccgaaagaaattggagccttccagatgacggaactccggcggattctccgccgagagcgactcgtcgcccaaaccccggttgtagtccaccggcatagcgccatgtcgctccagccagcgctccagcaagttcggccctgcgtgacctcgttcccagtcaagttcgccttccatctccacgcgggatggcaggcgctccggagcgatatcaacgcatcgatcgccacgctgcgaccaggtgatgtactcaatccaccggtcgggatgatggatcaaatagaagcacttggccacttcaccaaaaaggtacgccagcatggcccgcaaggggactcctttctcctgcacgatggcccccgatcttgtagcacgccgcaggattgggtctcgccaccccgtcaatagtgacgccagcgtagcatccgcctgctggcgggccgcagaccggccgagtcgattgacatccatgagttcctggacgtaccagtggcgattggcgtcaatgcgctgctgcaactcgtcctgcttgaccaagagcggtatgcgacgcagaagtgaacagatcgagccgcgattctcttgggacagcaaaccatcagccaccaaatcatcttcgacctgcttgaagaaatcgctactgagcggtgactgagtgaggatagcggcaatttcggcggccttccccgtcatctttcgcatttcactggtcgtcagagggccggcgccggcagtctcagcatagctgccccacgaccaacgccatgcggatcggtcgcgttcgacactgtacgggaagacaatctgaaaccggtcggtgggaacaggataggtcccgatgatgcgatagttgtccttcggattggacgagatcagcgtcccgcgtccggcccgtcccttttgttcggtggcctggtccaacgacccggctcgcacgcccgtgccgtactccgcctggcaggccaggtgcaccagcaggtccggcgggatgtcgatctcgaacagggcgttgatcgcgtttttcgtcgccaccgtcacggctgaggaactggagaaacccccctgggggatgtcacccgtggagaccagccgcaggcccatgaagttgtcgcggccgagatgcgcctggactttcgctcccaggttgccgccgcgcagcgtgcgcatggaagcgatggcgttgccgactaatgagaatggacgtcgcatgttgctgctgacccacagcgacggcggcggcaacggcagccccttcccgcgtcgctgctcgagttcatcatcgctgaagtaccccagcgagagcaggagcgtctcgctcatgtgggtgccaaactcctcgtatgcgtgcaagtcggagacgtcttcgcccggatacatgacaggactgtcggagggaatggaattgacgttctcgcgatacttcaggtttgttgggtgtaagtggatccggccatcgcttgtgccctgggcgagcatgacgatctgctcactgcccgattcatcgccggcgccgatgggcatctgccaggcgggcccgaagaatcggaccatatccgggtgcataaaggcaatgcgcagacgccctcccgagatgccgattcccagcggttggtcgcccttgaacttaagcccttcccgctcggccatcgcgacgagttcggccagttgacgggcgatcgaagcgatctgtccctggggacggtcggcggcaatcgcctgcgcggcctcgtctgtttcctgctcctcgggaaacggcaagcagccggtcgtcgccagaatcccctccaggagggccaggtctctgggctgtgtcacgtccgagcacagcaggtcatactcagggtcggtgggcgtcgttgtcattgtgcggatatccccaccgtcccggctgatggcttcaatgatgtcggtcaggtagtactgggcctgggcgttggcgttgctgagatcctgcaggtatcgcatcagggtggcggcgcggacgacatacagggggcagttcccctccgttagatccagaagacgttgacgcgccgaagcatcctgttcggcgacaatgtccttttcttcgataatgcgagtgacttgccggtctttgtccctcagtatgcggcctttgcctcgattcctcggcggttcgtatcgcgcggtcaggagcgtgagatcagcctcacgcggtccgctgcgatgacgctcgcagaggcggcgaaacacagaggagggcaccacccgatcgcccatcgtgatgacgagcagggggtccttctccaggagcgttggaatgctgaacgcctcgaacgcggcgaaggcggttcctcccgtggggttgtctgagcgaatgtaggtgttgtcatttcccagtgctgtcgagacttcctcgtggcgatagccgacgatgccgatcacgggtgaccggctgaaacggcggaacgcctcaatcgaatgacgggccagtggcgttccgtgtaccggctggatacacttcggggcctggccgaaccgcgtgcctttgccggcggcaagaatcaccaggacaggcgtctccgtcgtgataccatcgaaggaattgagactctccggattgaggatctttgcctcgtcaagcggggtcgcctctctgaggggacgactcgcctctgatccctgtgtctctccattgctcatgtgtcccatccaaactgtctcaacctacttctgcgaaaaccctgccgcatggcgtgtgccgcgagtttatcagacaacccattccctagcaaccctccttgacctggcgaaaggaatgcgcgggctgcgattttttatctccgattcgcatttttaggtttaattctcacggcgatcatgtggtatctcagagaggatggtcaaattaaccttcccggccccagatcgcgtgatcggcgcgtcggggcagggcccttctctgggaacgaggttctggcggaacgatgggaatagacgaccagaaagagaatcggctggatggatcgctgaatccggagccgttcctgcgccagttgaccgctggtcagaatcgcatctacgctttcatcctgacacgcgtcgccaattttgccgacgccgacgacatcatgcaggagacggtggccgtgatgtggcgaaaatacgcccaattcgagcccggcacggatttcgtttcctggggtgtgcggatcgcgcattatgagatcctgagattccaccgaggccgtcgcggattccagtttcgccaggaagtggatgaagcgctcttcgagctggcgatctccaagggccaggagatcgatcgtcggatcgaggcgctgcgcggctgtctgtcgaaattggaccgccgcgaacgtgagatcatcaggatgcgctacgaacagaacttggcgtgcaagaacctggccgagcggatgcgcgtctcggcccagaccatcagcaagacgctcggacggattcatgatgcgttgctccgttgcatccgagggacgctagcagcagaggagattgactgatgtcagacgaggcgaagcccggtgatacgtcgcaactgagcgaattgatcacggccatgctggatggcgccatcacgcaggagcagttcgaccaactggatgaattgctggctggtgatgaagggacgctggagtactacgccgagtttttgaccctttgtgccgtactacgcaaatactacggcgccgaactgccggcttccgaccgaggacctcgcggtttcgatcagacggtcgttctatccgaggttatcgagcaggatctgcagacgcaggcggaaatcgaagctgacgtggcaggaatggagaggcaagcacgtcgcgaggttgtgcgaagggcggccgaagaagccctggagcggttcatggccgaggagcgtcgacgtcaggaagaacttgcccataaactatatctggcccggcgccgtcgactgctcgtgggaatgggatcgctggccgccttgctggtcgtggtcttgtgcgtctggctgtttgagccccgtcccgaaccaccggcggctgtaacgccgacgatggcagcggcgccccctgtggtcgccagggtcaccgactcgctagacgctcaatggcggccgcggggcatgtccaccgagcccgggaccgaactgatcgccggacccttgtccctgcgccgcggtcttgtgcgcattaccttcaactgcggggccgatgtgatactcgaggccccggcggaaattgaaatagaagcggtcgatcaaatgctgttgtggcgcggtcgtgtggctgccaaagccggcaaagaggccatcggtttcaccgttcgcacgcccggcgcgacggtggtggactacgggaccgagttcggtgtttccgtcagcgggtccggccaaacagaagcccacgtcttcaaaggccaggtggaggttcgctccgggcccagtgtgcgcgtcttcgacgaatcgcgtcgggtgactgcccagcaagcttgtgccgtcgatcgagagggcaagctgtcgcagacgaatctggccgcacggcctgagttgtttcaacggcatgtgccctcaccgtacgaactggccgtgtgggatacgcgcccggcggcctactggcggttcgatgccgatgatcccaatcagtttgtcaatgtcctggaccaacgcaccaacctgggccacctcgtgggccccgtccagttctccatgggccccgacctgggagcggacaagcaggcgcaggctctcgaacttgacggatacagtggtcgcgccgttgttgcgaacatgactcctccgagcggcactcaaacaacgggatacacttacgtcatgtgggtgcgccccgatgagattcgggaccagttcatccttgccgccgtgaacaaggccggcgcgcagcgcgtggtggcgatgacagccgacgggcgattcgaccattattatgttagcggaaagggcaaacccgtcgcgcgtgtccagagtcaaaccatcgcgcgtcgtggtctatggtatcatgtggcgatcctgcgcacgggccacggcgaccggcgactgtttgtcaatggcgtcctggacgccagcgcagaggcctcagttcatggcacccctggattcctccgtaaattctgcctcggggcgatggacgaggagaagcacatggcgggattggccccctggcggggcgggctcagcgagatggcgatctactgcagggccctcagcgaacgggagattgccgatctgtacatgtcatcacaggaaaggtgaggagcagtgagaaggtcggttgcggccatgttcatggagaagtcacattcttgaggttcagaacgatgaccaggaagttgggcggcagaggtttcacgttgatcgaactattggtggtgatcgctatcattgcggtgttgatggcgatcctgatgccctcgctgcaaaaagccaggcaccaggcacagcgggcgacttgcgcggcccacttgaagtcgtgcggctacgccggcgtgctatacgccaatgataacgagggccgcttccctgggtgtcacatggagttgtctccaggttccggcagttacgccgtttggatcagcggtcgtcaggacgacccccagaccaagggctatatggcgcacggcttgttcttccaccatcgactgatgatggatcccaagctgttctactgtccgggcaacaacaaccccacactcaaatatggacaggccgacctctcctcaccaggaggcgggtggcccaagggggatatccccgatgatctcggtcccaaccaggcgtgggtccagacgacctatcactaccgatccctctgggatggaaagaagtggcgggcggtcaatgtcgtgcgagacagcgggggactggccttcatggccgatatgttctccgatcccactcggggtctcgagtaccaccataagaacggatacaacgtggcctttacggatggtcacagcgagtttgtgaaggatctggacggccagatacaggactttggcggtggcacgacgtaccacgtggaccacagtcgtcaggattatgtctggaagagatacttcgacaagatcaccaggtacaagccgcacaaggagtactgactctccgtggcggttccctttcgacgtggttttgcgttgagggataatgacccagatagacgaaggaaaatggtaggagagcgttaatgaaccgacggatgttcctgaagaactgttttgccgccaccggtgcggccctcacggccggcacggcactgaaagccgctgaaactcatcccgggcggcaacggcccaatgtcgtctttatcatggctgatgacatgggctatggcgatccggcctgtctcaatcccgactccaaaatcccgacgccgcacatggaccgcctggcgcaggaggggatgatcttcaccgacgcccacagtggttcggccgtgtgcacgcccactcgatacggggtcctgacgggtcgctactgctggcgcagccgccttaagaagggagtactcaacggctacagtcgggcgctgattgagccgggacgcacgaccgtggcttccttgctcaagacgaatgggtaccgaaccggttgtgtcggtaaatggcatctgggactgaccgatacgcagccggccgactacagcaagcccctgcgcccggggccaaacgaagtcggcttcgactactggttcggcatccccgcgtcgctggacatgacgccttacgtctatctggagaatggattgcccacgcgtcctcccacggagacggtcgctggttctccttatccggccttttggcgcggcggtccgatcgccgacgacttcaagcacgaggacgtcatgccccggattaccgagcaggcggttggattcatcgaccactgttgccaggaccattcggacaagccgttcttcctgtattttccgctgacggcgccgcatacgccctgggtgccgctggagcgaaaccaccagcagagccaggccggcgtttatggcgatttcgtgaccctggtggattggacggtcgggcagatccttgagacgctggacgcccatggcattgccgacaatacactggtgattctgaccagcgacaacggctcgcacgaggcccagatcggcaagcataacaatggtgtttcggtcggctcgcccaattttggccatgaggccaactacatctatcgaggccagaaggcggatgtctgggacggcggccatcgcgtgccgttcctggcgcggtggccggagatggtgacgcccggtggccggtgcgatatgccgatctgcctgaccgacttggtggcgacgtgtgcggagatcgtggaccagaccctgcctccagagaccggagaggatagtgttagctttctcccctatctcaagggcgggcgccccgctcggcccacgcgtgaagcgatcgtacaccattcgatcagtggcgtcttcgctctgcgtaagggcaagtggaaattcatcgacggggtgggatcgggcggttggtcgggcaagggtgatggcctgccgggccagctctatgacatgcaggcggacccgcaggagcggaacaacctgtacagcgatcccggacatcaaaccattgtctacaatctcagggcgctcctgacgcgctacaaagaacagggacacagtcgtcccgtgacttaggatggagacaaagaatgcatcgacgtgagtttctaaggcggtgtgcatgggtgggcggcgccgcgagcgtgtttccggtggtcaacgcgactcgggcggcccgtacgcctgcatctgacggcggcatgagacgaccgaatatcgtcttcatactggccgatgatatggggtatggcgatctggcctgtcagaaccccgagtcaaagatccctacgcccaacctcgaccgcctggcgcgcgaaggcgtgcgtttcaccgacgcccattcaccgtcggcggtgtgttcgccgacacgctacggcgtcttgaccgggcgttacgcgtggcggacccggctcaagagaggtgtgctctggtgctgggacaggcccctgatcgaacccgatcgactgactgttggcaagctactcaagacgcacggctacgatacggcgtgcatcggtaagtggcatctcggttggaactggcccactacggatggtaaggaccccgtcggtatgggcaagagcgcacccaacggcggcaccaacgtggacttcacgcaaccgatcacggacggcccgacgaccagaggattcgattactacttcggaacggatgtgccgaactttccgccgtattgtttcattgagaacgatcgcaccgtggggataccgactgtgcccaagccgggaaagatgtttggcgcgccggggccaatgcttgaaggttggaaactggaggagatcttgcccggactggggggcaaggccgtcgagtacatcgatgccaaaggccggttgacgcgcaacgaggcatttggccagaccgaaggcaatcctttcttcctgtacatgcccctgacggcgccccatacgcctatcgcccccgacccggcgtctcagggcaagagccaggccggggcctatggtgactttgtttatgaagtcgatcgggtcgttggccaggtgctcgaggctctggagcggaacggcttcgccagcgagacgctggttgtcttcaccagtgacaatggctcgccgggtcgcgacgggacgaatatgagcggggcggtcaacgccgtgcgtaagtttggacacaatcccagccacatctatcgcggcatcaaggccgacgcttgggagggggggcatcgcgttccgtttctggcccgttggccgggacatacgaaaccgggttctgtctgcgatgagaccgtctgccatgtggacctgatcgctacgtgcgccgagatcctcggatcggatcttcctgagaatgcggccgaggacagcttcagcttcttgcctcttcttctggatgagccctccagcgggccggcgcgagaggcggttgttcatcactccggcaatggtgtgttcgccatccgtcaaggcaagtggaaattcatcgatggggtgggatcgggcggttggtcgggcaaaggcgacggcctgccgggccagctctatgacatggaggccgatccgaccgaaaaaaacaatctttataaggatcgcaggtatcaaaacgttgtcaacggcctcagggatctcctggaacaatacaagcgccaggggcatagcagatcaatgacgtagtctctgcaaattgaacgattttcggcgtgtgccgagacatagatactactttgtagtgtggaggaatgagccatgtataagaaagcactgtgttggctttttagcctgagcctcttcttggtgatgagtaacacgggctcggcgcaaatcctgatcagcgacaattttgacggaggcggcctgggcgccggtgacggttcatcggtcaacggtggatttacgctgacggccaatagcatttcggccgccagtgccaccgcagaggcggattcctatgccgaagtcgtgaccacgggcggtgcgaatgggaatgccggcatttgcagtaacaccagcttcgattcgctcagtgccgcggccatgagcaagggattgaccgttgaatgggtcgtgaccagtctgtcgcaaacgaccaatgccaacggcaacacgtttacccttcagcgtgacaatgtgttcttcaatacactgccctatgtcggtgtgatgttttccggcaaggccggcaccattcccgatggcgtgagattcgtgggcaagaacaacaccaccgggggtccaacccacaatctctcggaactgtacaattatgatcaggcgtctttcctggacggttttacagtgagattcacgatcaatgaaaccggatgggcgtttcaggtggaagggttggatattgatgttgcggaagaggggagttggcctgctgatttcgctctcactgatgttctcgatggcgattcgtttgtatcagcgcatgcccagactccaggcgccgatctcacggctcgttacgacagttgcgaggtatggattggcaagaaggatgcgtcaagggcgaacaccccgcaaccggaaaaccagactgaggacgtgttgcgtgacgccgttttggcttggaacgccggcgagtttgccgcggcgcacgatgtgtacgtgggtgtctcgttcgatgatgtcaatgacgccgaccgggccaatccgctgggcgtgttggtcagtcaggggcaggtggatgcggcatacgatctgccgggtctcgaatttggtcagacctactactggcgagtcgatgaggtcaacgccgccccggacaatacgattttcaagggcgacctctggagcttcacgaccgagttgttcgcctatccgatcgagaacgtgaccgcgacgagcaacggtgtgtccgaagaaggcgtaggaccggagaataccgtcgacggctcggggctcgacgccgacgatcagcactcggtcgagagcgccgatatgtggacggcaaccctgggagatgagccgctgacgattcagttcgagttcgaccgcgtccataagctccatcagatgctcgtctggaactacaacgtctcgttcgagccgctgctcggcttcggcgtcaaggatgtgaccatcgagtattcgaccgacggcatcgactggacggtcctgggcgacgtcgtgctggcgcaggcgacggctttcgacacctatacggccaacaccacgatcgatttccccggtgcggcggtcaaggtcgtaaaactgacggtcaacaacgcctacggcgactcgggcaagttcgggctcagcgaagtccgcttcctgtccatccccgtccaggccgccgagccccagccggccgacggcgccgccgatgtcacggtttcggatgtgaacctgagttggaaggctggtcgtgaggcaactgggcacgacgtgtatctcagcaccgatcccaacgccttgacgctgatcgattcggtcagtgacaacaccgtcgatcccggcgccctcgatctggggaccgcctactactggaagatcgatgaggtcaacgaggccgaggaggtcagcacttgggaaggcgacatctggagcttcaccacgcaggcgctcatcgtcgtcgaggacttcgagagctacaccgacgacatcgaggcgagcgaagccatcttcctgacctgggtcgacggctacgaaatggccggcaacaattcgcaggtcgggtatcttgaggcgcccttcgctgaggacacgatcgtccatggcggcggtcagtccatgcccctgatctacgacaacaccgacggcgggatatcggagaccactctcacgttcgatgtcccgcaggactggtcggccaacgccatccaaaccctctccctgttcgtgtatggtgacggggccaacagcggtggccagctctacctgaagatcaacaacgccaaggtctcgtatgcgtatctggccgatgtgctccagcggcagcagtgggtctcatggacaattgacctggcttcgaccggcgccaatctgtccagcgtgacgagtgtgacactgggtatcgacggagccggtgcttccggcatgatcttcgtggacgatatgtgtctctacccccaggctgtggaactgatcgagcccgtgctgcctcccgagaacgatccgaacctggtggcccactatgagttcgagagcaacgccaatgacagtcgaggaaattatcacggtgcggccgaaggcacgccagcctatgcaacgggtaaggtcggtcaggccatcagtcttgacaaggacgacgatcacatcgtcaatgattttgatgatgttgtttggcctgctttcagcgtctcgttgtgggtgaagacggatgtcactaaccaggtcaattactccggtttgttcaacaacaacagcgccggcgccgacttccagcttgatgtcgatggaaccgacccggggaactacaaataccagggcggcaacagccgggtcttgggtccggtgattaatgactgggtccatttggcagtcagttgtgatggtgccgggacgagcctctactataacggtctgatcgtggcgaccgtcaatgcagtggataatgtattcggccagatcgccattggcattaatcgtggcatgagtactcggtttggcggaatgatcgacgaggtgcgtctctacaaccgcgcgatctccgaggccgaagttctcggattggctggtgtcacagagtcggtcccgaaatcgctctgacagtgaggctattatggcgtccggccatcaaggcgtacgctgttatgtgaaagtactcgaatcggagagggctgtgggcatcgctcgcagtcctcttcggcagtttagactctttctggcaatcgctgtcaccggggttcactgacggtgaggccaatacgcccgtagggtgcataaactcatcggggcgtaacgtgagtcatttcagatcgttagcttcgaaatcacgatgaaagatgaggtggtagggcgagggatcgtggggcgtcggtccctgaaatccgttcagattccgcgtattggatgtggagatcacagacggcgcgcactacctccaggagcgtggcacactatggcggtgtcatgctgcttggcgatggtaggatttcagcagtccacccagacgctcaatgcaaatgaggtgacctcggtttccttcatgcttcgggtcgatgatccggttgataccctggtggatcctctcagggtggtagtgctcaagatattcggagaggacatgattaagctgctgttcagatgagagaatgagcttattgaggcactcctctttgatggatctgacgaagcgctccgcgaaggcattgagattggggctgcgtggtggtagtttcactgattccagaccggcgtctcgtaagattctcctgaacttcgcggtatacagtggatcgcgatcatgaatcaggtatgcgttacctgccagaaagttgtcttcccacgtgagattgcgagcaatctgctccatccatgatgccagcgtcaaaagtcccgaactgcgaggaagaccggcgtttttgcgccacaatcggggctggaactgccaaattccgacttttgacgcaggcgtcatccatagaccgttgggtttgggtctgacgccaaggatggccactttgcgtgtggacaaatccatggcaaatagcaccatgcagcggatgagcttgcccttgactagcagctcaaccgagaagaagtcacatgcggccaaaacgctccagtggctcctgatgaatttcttccaggttgtcttccgggtgaagtctggctcagggtcgtagccattcgcaaggaggatatttttgacggtggtctctccgatcttgtatccgaggtagacgatgtagtccttgattctggtgtagccccaatgcggattctcctgcctgaatcgtagcaccagttcgacgatctcctgagacatcctcggcggccctggattcttgcagttcttgcttccatcatacttctgggcgatgagttttcggtaccagccgagaacggtgtcgggcgtgaacaggacagtggtttcctccagaagccttcgcgtcagccgtttagcctttgctgccagcctgatcctctggtagtcgctcaatagggtgcgtctgtccttttcctgctgctcctgcaggaccctgacctgctccttgaggtagtcgatagctctccagagttccttgtcgacacaatacgctaggcaggtgatcagtgtgatccataatctctgtttcatagtcccgagaggctaatgcacagggaggcggcaggcaagcgctttcgtagggcaatggcataaagtccttgatcagaggcatttaggataggataatacttgcaccctacgcgagatcgattgccacaccgacatgacaggaagccagcgcatgaaaaagcggggcttgcgtcatgttgacacaagccccgcctgcgtatcacgatacagatcgcatactaactgagagcgatgctcccaacgatacacaggaacaacgcagc

SEQ ID NO: 941 - DNA, 264443 bp, Artificial Sequence
  Synthetic Oligonucleotide
  misc_feature (1)..(95811): n is a, c, g, or t
nnnnnnnnnnnnnnnnnnnnnnnnnnnnnnnnnnnnnnnnnnnnnnnnnnnnnnnnnnnnnnnnnnnnnnnnnnnnnnnnnnnnnnnnnnnnnnnnnnnnnnnnnnnnnnnnnnnnnnnnnnnnnnnnnnnnnnnnnnnnnnnnnnnnnnnnnnnnnnnnnnnnnnnnnnnnnnnnnnnnnnnnnnnnnnnnnnnnnnnnnnnnnnnnnnnnnnnnnnnnnnnnnnnnnnnnnnnnnnnnnnnnnnnnnnnnnnnnnnnnnnnnnnnnnnnnnnnnnnnnnnnnnnnnnnnnnnnnnnnnnnnnnnnnnnnnnnnnnnnnnnnnnnnnnnnnnnnnnnnnnnnnnnnnnnnnnnnnnnnnnnnnnnnnnnnnnnnnnnnnnnnnnnnnnnnnnnnnnnnnnnnnnnnnnnnnnnnnnnnnnnnnnnnnnnnnnnnnnnnnnnnnnnnnnnnnnnnnnnnnnnnnnnnnnnnnnnnnnnnnnnnnnnnnnnnnnnnnnnnnnnnnnnnnnnnnnnnnnnnnnnnnnnnnnnnnnnnnnnnnnnnnnnnnnnnnnnnnnnnnnnnnnnnnnnnnnnnnnnnnnnnnnnnnnnnnnnnnnnnnnnnnnnnnnnnnnnnnnnnnnnnnnnnnnnnnnnnnnnnnnnnnnnnnnnnnnnnnnnnnnnnnnnnnnnnnnnnnnnnnnnnnnnnnnnnnnnnnnnnnnnnnnnnnnnnnnnnnnnnnnnnnnnnnnnnnnnnnnnnnnnnnnnnnnnnnnnnnnnnnnnnnnnnnnnnnnnnnnnnnnnnnnnnnnnnnnnnnnnnnnnnnnnnnnnnnnnnnnnnnnnnnnnnnnnnnnnnnnnnnnnnnnnnnnnnnnnnnnnnnnnnnnnnnnnnnnnnnnnnnnnnnnnnnnnnnnnnnnnnnnnnnnnnnnnnnnnnnnnnnnnnnnnnnnnnnnnnnnnnnnnnnnnnnnnnnnnnnnnnnnnnnnnnnnnnnnnnnnnnnnnnnnnnnnnnnnnnnnnnnnnnnnnnnnnnnnnnnnnnnnnnnnnnnnnnnnnnnnnnnnnnnnnnnnnnnnnnnnnnnnnnnnnnnnnnnnnnnnnnnnnnnnnnnnnnnnnnnnnnnnnnnnnnnnnnnnnnnnnnnnnnnnnnnnnnnnnnnnnnnnnnnnnnnnnnnnnnnnnnnnnnnnnnnnnnnnnnnnnnnnnnnnnnnnnnnnnnnnnnnnnnnnnnnnnnnnnnnnnnnnnnnnnnnnnnnnnnnnnnnnnnnnnnnnnnnnnnnnnnnnnnnnnnnnnnnnnnnnnnnnnnnnnnnnnnnnnnnnnnnnnnnnnnnnnnnnnnnnnnnnnnnnnnnnnnnnnnnnnnnnnnnnnnnnnnnnnnnnnnnnnnnnnnnnnnnnnnnnnnnnnnnnnnnnnnnnnnnnnnnnnnnnnnnnnnnnnnnnnnnnnnnnnnnnnnnnnnnnnnnnnnnnnnnnnnnnnnnnnnnnnnnnnnnnnnnnnnnnnnnnnnnnnnnnnnnnnnnnnnnnnnnnnnnnnnnnnnnnnnnnnnnnnnnnnnnnnnnnnnnnnnnnnnnnnnnnnnnnnnnnnnnnnnnnnnnnnnnnnnnnnnnnnnnnnnnnnnnnnnnnnnnnnnnnnnnnnnnnnnnnnnnnnnnnnnnnnnnnnnnnnnnnnnnnnnnnnnnnnnnnnnnnnnnnnnnnnnnnnnnnnnnnnnnnnnnnnnnnnnnnnnnnnnnnnnnnnnnnnnnnnnnnnnnnnnnnnnnnnnnnnnnnnnnnnnnnnnnnnnnnnnnnnnnnnnnnnnnnnnnnnnnnnnnnnnnnnnnnnnnnnnnnnnnnnnnnnnnnnnnnnnnnnnnnnnnnnnnnnnnnnnnnnnnnnnnnnnnnnnnnnnnnnnnnnnnnnnnnnnnnnnnnnnnnnnnnnnnnnnnnnnnnnnnnnnnnnnnnnnnnnnnnnnnnnnnnnnnnnnnnnnnnnnnnnnnnnnnnnnnnnnnnnnnnnnnnnnnnnnnnnnnnnnnnnnnnnnnnnnnnnnnnnnnnnnnnnnnnnnnnnnnnnnnnnnnnnnnnnnnnnnnnnnnnnnnnnnnnnnnnnnnnnnnnnnnnnnnnnnnnnnnnnnnnnnnnnnnnnnnnnnnnnnnnnnnnnnnnnnnnnnnnnnnnnnnnnnnnnnnnnnnnnnnnnnnnnnnnnnnnnnnnnnnnnnnnnnnnnnnnnnnnnnnnnnnnnnnnnnnnnnnnnnnnnnnnnnnnnnnnnnnnnnnnnnnnnnnnnnnnnnnnnnnnnnnnnnnnnnnnnnnnnnnnnnnnnnnnnnnnnnnnnnnnnnnnnnnnnnnnnnnnnnnnnnnnnnnnnnnnnnnnnnnnnnnnnnnnnnnnnnnnnnnnnnnnnnnnnnnnnnnnnnnnnnnnnnnnnnnnnnnnnnnnnnnnnnnnnnnnnnnnnnnnnnnnnnnnnnnnnnnnnnnnnnnnnnnnnnnnnnnnnnnnnnnnnnnnnnnnnnnnnnnnnnnnnnnnnnnnnnnnnnnnnnnnnnnnnnnnnnnnnnnnnnnnnnnnnnnnnnnnnnnnnnnnnnnnnnnnnnnnnnnnnnnnnnnnnnnnnnnnnnnnnnnnnnnnnnnnnnnnnnnnnnnnnnnnnnnnnnnnnnnnnnnnnnnnnnnnnnnnnnnnnnnnnnnnnnnnnnnnnnnnnnnnnnnnnnnnnnnnnnnnnnnnnnnnnnnnnnnnnnnnnnnnnnnnnnnnnnnnnnnnnnnnnnnnnnnnnnnnnnnnnnnnnnnnnnnnnnnnnnnnnnnnnnnnnnnnnnnnnnnnnnnnnnnnnnnnnnnnnnnnnnnnnnnnnnnnnnnnnnnnnnnnnnnnnnnnnnnnnnnnnnnnnnnnnnnnnnnnnnnnnnnnnnnnnnnnnnnnnnnnnnnnnnnnnnnnnnnnnnnnnnnnnnnnnnnnnnnnnnnnnnnnnnnnnnnnnnnnnnnnnnnnnnnnnnnnnnnnnnnnnnnnnnnnnnnnnnnnnnnnnnnnnnnnnnnnnnnnnnnnnnnnnnnnnnnnnnnnnnnnnnnnnnnnnnnnnnnnnnnnnnnnnnnnnnnnnnnnnnnnnnnnnnnnnnnnnnnnnnnnnnnnnnnnnnnnnnnnnnnnnnnnnnnnnnnnnnnnnnnnnnnnnnnnnnnnnnnnnnnnnnnnnnnnnnnnnnnnnnnnnnnnnnnnnnnnnnnnnnnnnnnnnnnnnnnnnnnnnnnnnnnnnnnnnnnnnnnnnnnnnnnnnnnnnnnnnnnnnnnnnnnnnnnnnnnnnnnnnnnnnnnnnnnnnnnnnnnnnnnnnnnnnnnnnnnnnnnnnnnnnnnnnnnnnnnnnnnnnnnnnnnnnnnnnnnnnnnnnnnnnnnnnnnnnnnnnnnnnnnnnnnnnnnnnnnnnnnnnnnnnnnnnnnnnnnnnnnnnnnnnnnnnnnnnnnnnnnnnnnnnnnnnnnnnnnnnnnnnnnnnnnnnnnnnnnnnnnnnnnnnnnnnnnnnnnnnnnnnnnnnnnnnnnnnnnnnnnnnnnnnnnnnnnnnnnnnnnnnnnnnnnnnnnnnnnnnnnnnnnnnnnnnnnnnnnnnnnnnnnnnnnnnnnnnnnnnnnnnnnnnnnnnnnnnnnnnnnnnnnnnnnnnnnnnnnnnnnnnnnnnnnnnnnnnnnnnnnnnnnnnnnnnnnnnnnnnnnnnnnnnnnnnnnnnnnnnnnnnnnnnnnnnnnnnnnnnnnnnnnnnnnnnnnnnnnnnnnnnnnnnnnnnnnnnnnnnnnnnnnnnnnnnnnnnnnnnnnnnnnnnnnnnnnnnnnnnnnnnnnnnnnnnnnnnnnnnnnnnnnnnnnnnnnnnnnnnnnnnnnnnnnnnnnnnnnnnnnnnnnnnnnnnnnnnnnnnnnnnnnnnnnnnnnnnnnnnnnnnnnnnnnnnnnnnnnnnnnnnnnnnnnnnnnnnnnnnnnnnnnnnnnnnnnnnnnnnnnnnnnnnnnnnnnnnnnnnnnnnnnnnnnnnnnnnnnnnnnnnnnnnnnnnnnnnnnnnnnnnnnnnnnnnnnnnnnnnnnnnnnnnnnnnnnnnnnnnnnnnnnnnnnnnnnnnnnnnnnnnnnnnnnnnnnnnnnnnnnnnnnnnnnnnnnnnnnnnnnnnnnnnnnnnnnnnnnnnnnnnnnnnnnnnnnnnnnnnnnnnnnnnnnnnnnnnnnnnnnnnnnnnnnnnnnnnnnnnnnnnnnnnnnnnnnnnnnnnnnnnnnnnnnnnnnnnnnnnnnnnnnnnnnnnnnnnnnnnnnnnnnnnnnnnnnnnnnnnnnnnnnnnnnnnnnnnnnnnnnnnnnnnnnnnnnnnnnnnnnnnnnnnnnnnnnnnnnnnnnnnnnnnnnnnnnnnnnnnnnnnnnnnnnnnnnnnnnnnnnnnnnnnnnnnnnnnnnnnnnnnnnnnnnnnnnnnnnnnnnnnnnnnnnnnnnnnnnnnnnnnnnnnnnnnnnnnnnnnnnnnnnnnnnnnnnnnnnnnnnnnnnnnnnnnnnnnnnnnnnnnnnnnnnnnnnnnnnnnnnnnnnnnnnnnnnnnnnnnnnnnnnnnnnnnnnnnnnnnnnnnnnnnnnnnnnnnnnnnnnnnnnnnnnnnnnnnnnnnnnnnnnnnnnnnnnnnnnnnnnnnnnnnnnnnnnnnnnnnnnnnnnnnnnnnnnnnnnnnnnnnnnnnnnnnnnnnnnnnnnnnnnnnnnnnnnnnnnnnnnnnnnnnnnnnnnnnnnnnnnnnnnnnnnnnnnnnnnnnnnnnnnnnnnnnnnnnnnnnnnnnnnnnnnnnnnnnnnnnnnnnnnnnnnnnnnnnnnnnnnnnnnnnnnnnnnnnnnnnnnnnnnnnnnnnnnnnnnnnnnnnnnnnnnnnnnnnnnnnnnnnnnnnnnnnnnnnnnnnnnnnnnnnnnnnnnnnnnnnnnnnnnnnnnnnnnnnnnnnnnnnnnnnnnnnnnnnnnnnnnnnnnnnnnnnnnnnnnnnnnnnnnnnnnnnnnnnnnnnnnnnnnnnnnnnnnnnnnnnnnnnnnnnnnnnnnnnnnnnnnnnnnnnnnnnnnnnnnnnnnnnnnnnnnnnnnnnnnnnnnnnnnnnnnnnnnnnnnnnnnnnnnnnnnnnnnnnnnnnnnnnnnnnnnnnnnnnnnnnnnnnnnnnnnnnnnnnnnnnnnnnnnnnnnnnnnnnnnnnnnnnnnnnnnnnnnnnnnnnnnnnnnnnnnnnnnnnnnnnnnnnnnnnnnnnnnnnnnnnnnnnnnnnnnnnnnnnnnnnnnnnnnnnnnnnnnnnnnnnnnnnnnnnnnnnnnnnnnnnnnnnnnnnnnnnnnnnnnnnnnnnnnnnnnnnnnnnnnnnnnnnnnnnnnnnnnnnnnnnnnnnnnnnnnnnnnnnnnnnnnnnnnnnnnnnnnnnnnnnnnnnnnnnnnnnnnnnnnnnnnnnnnnnnnnnnnnnnnnnnnnnnnnnnnnnnnnnnnnnnnnnnnnnnnnnnnnnnnnnnnnnnnnnnnnnnnnnnnnnnnnnnnnnnnnnnnnnnnnnnnnnnnnnnnnnnnnnnnnnnnnnnnnnnnnnnnnnnnnnnnnnnnnnnnnnnnnnnnnnnnnnnnnnnnnnnnnnnnnnnnnnnnnnnnnnnnnnnnnnnnnnnnnnnnnnnnnnnnnnnnnnnnnnnnnnnnnnnnnnnnnnnnnnnnnnnnnnnnnnnnnnnnnnnnnnnnnnnnnnnnnnnnnnnnnnnnnnnnnnnnnnnnnnnnnnnnnnnnnnnnnnnnnnnnnnnnnnnnnnnnnnnnnnnnnnnnnnnnnnnnnnnnnnnnnnnnnnnnnnnnnnnnnnnnnnnnnnnnnnnnnnnnnnnnnnnnnnnnnnnnnnnnnnnnnnnnnnnnnnnnnnnnnnnnnnnnnnnnnnnnnnnnnnnnnnnnnnnnnnnnnnnnnnnnnnnnnnnnnnnnnnnnnnnnnnnnnnnnnnnnnnnnnnnnnnnnnnnnnnnnnnnnnnnnnnnnnnnnnnnnnnnnnnnnnnnnnnnnnnnnnnnnnnnnnnnnnnnnnnnnnnnnnnnnnnnnnnnnnnnnnnnnnnnnnnnnnnnnnnnnnnnnnnnnnnnnnnnnnnnnnnnnnnnnnnnnnnnnnnnnnnnnnnnnnnnnnnnnnnnnnnnnnnnnnnnnnnnnnnnnnnnnnnnnnnnnnnnnnnnnnnnnnnnnnnnnnnnnnnnnnnnnnnnnnnnnnnnnnnnnnnnnnnnnnnnnnnnnnnnnnnnnnnnnnnnnnnnnnnnnnnnnnnnnnnnnnnnnnnnnnnnnnnnnnnnnnnnnnnnnnnnnnnnnnnnnnnnnnnnnnnnnnnnnnnnnnnnnnnnnnnnnnnnnnnnnnnnnnnnnnnnnnnnnnnnnnnnnnnnnnnnnnnnnnnnnnnnnnnnnnnnnnnnnnnnnnnnnnnnnnnnnnnnnnnnnnnnnnnnnnnnnnnnnnnnnnnnnnnnnnnnnnnnnnnnnnnnnnnnnnnnnnnnnnnnnnnnnnnnnnnnnnnnnnnnnnnnnnnnnnnnnnnnnnnnnnnnnnnnnnnnnnnnnnnnnnnnnnnnnnnnnnnnnnnnnnnnnnnnnnnnnnnnnnnnnnnnnnnnnnnnnnnnnnnnnnnnnnnnnnnnnnnnnnnnnnnnnnnnnnnnnnnnnnnnnnnnnnnnnnnnnnnnnnnnnnnnnnnnnnnnnnnnnnnnnnnnnnnnnnnnnnnnnnnnnnnnnnnnnnnnnnnnnnnnnnnnnnnnnnnnnnnnnnnnnnnnnnnnnnnnnnnnnnnnnnnnnnnnnnnnnnnnnnnnnnnnnnnnnnnnnnnnnnnnnnnnnnnnnnnnnnnnnnnnnnnnnnnnnnnnnnnnnnnnnnnnnnnnnnnnnnnnnnnnnnnnnnnnnnnnnnnnnnnnnnnnnnnnnnnnnnnnnnnnnnnnnnnnnnnnnnnnnnnnnnnnnnnnnnnnnnnnnnnnnnnnnnnnnnnnnnnnnnnnnnnnnnnnnnnnnnnnnnnnnnnnnnnnnnnnnnnnnnnnnnnnnnnnnnnnnnnnnnnnnnnnnnnnnnnnnnnnnnnnnnnnnnnnnnnnnnnnnnnnnnnnnnnnnnnnnnnnnnnnnnnnnnnnnnnnnnnnnnnnnnnnnnnnnnnnnnnnnnnnnnnnnnnnnnnnnnnnnnnnnnnnnnnnnnnnnnnnnnnnnnnnnnnnnnnnnnnnnnnnnnnnnnnnnnnnnnnnnnnnnnnnnnnnnnnnnnnnnnnnnnnnnnnnnnnnnnnnnnnnnnnnnnnnnnnnnnnnnnnnnnnnnnnnnnnnnnnnnnnnnnnnnnnnnnnnnnnnnnnnnnnnnnnnnnnnnnnnnnnnnnnnnnnnnnnnnnnnnnnnnnnnnnnnnnnnnnnnnnnnnnnnnnnnnnnnnnnnnnnnnnnnnnnnnnnnnnnnnnnnnnnnnnnnnnnnnnnnnnnnnnnnnnnnnnnnnnnnnnnnnnnnnnnnnnnnnnnnnnnnnnnnnnnnnnnnnnnnnnnnnnnnnnnnnnnnnnnnnnnnnnnnnnnnnnnnnnnnnnnnnnnnnnnnnnnnnnnnnnnnnnnnnnnnnnnnnnnnnnnnnnnnnnnnnnnnnnnnnnnnnnnnnnnnnnnnnnnnnnnnnnnnnnnnnnnnnnnnnnnnnnnnnnnnnnnnnnnnnnnnnnnnnnnnnnnnnnnnnnnnnnnnnnnnnnnnnnnnnnnnnnnnnnnnnnnnnnnnnnnnnnnnnnnnnnnnnnnnnnnnnnnnnnnnnnnnnnnnnnnnnnnnnnnnnnnnnnnnnnnnnnnnnnnnnnnnnnnnnnnnnnnnnnnnnnnnnnnnnnnnnnnnnnnnnnnnnnnnnnnnnnnnnnnnnnnnnnnnnnnnnnnnnnnnnnnnnnnnnnnnnnnnnnnnnnnnnnnnnnnnnnnnnnnnnnnnnnnnnnnnnnnnnnnnnnnnnnnnnnnnnnnnnnnnnnnnnnnnnnnnnnnnnnnnnnnnnnnnnnnnnnnnnnnnnnnnnnnnnnnnnnnnnnnnnnnnnnnnnnnnnnnnnnnnnnnnnnnnnnnnnnnnnnnnnnnnnnnnnnnnnnnnnnnnnnnnnnnnnnnnnnnnnnnnnnnnnnnnnnnnnnnnnnnnnnnnnnnnnnnnnnnnnnnnnnnnnnnnnnnnnnnnnnnnnnnnnnnnnnnnnnnnnnnnnnnnnnnnnnnnnnnnnnnnnnnnnnnnnnnnnnnnnnnnnnnnnnnnnnnnnnnnnnnnnnnnnnnnnnnnnnnnnnnnnnnnnnnnnnnnnnnnnnnnnnnnnnnnnnnnnnnnnnnnnnnnnnnnnnnnnnnnnnnnnnnnnnnnnnnnnnnnnnnnnnnnnnnnnnnnnnnnnnnnnnnnnnnnnnnnnnnnnnnnnnnnnnnnnnnnnnnnnnnnnnnnnnnnnnnnnnnnnnnnnnnnnnnnnnnnnnnnnnnnnnnnnnnnnnnnnnnnnnnnnnnnnnnnnnnnnnnnnnnnnnnnnnnnnnnnnnnnnnnnnnnnnnnnnnnnnnnnnnnnnnnnnnnnnnnnnnnnnnnnnnnnnnnnnnnnnnnnnnnnnnnnnnnnnnnnnnnnnnnnnnnnnnnnnnnnnnnnnnnnnnnnnnnnnnnnnnnnnnnnnnnnnnnnnnnnnnnnnnnnnnnnnnnnnnnnnnnnnnnnnnnnnnnnnnnnnnnnnnnnnnnnnnnnnnnnnnnnnnnnnnnnnnnnnnnnnnnnnnnnnnnnnnnnnnnnnnnnnnnnnnnnnnnnnnnnnnnnnnnnnnnnnnnnnnnnnnnnnnnnnnnnnnnnnnnnnnnnnnnnnnnnnnnnnnnnnnnnnnnnnnnnnnnnnnnnnnnnnnnnnnnnnnnnnnnnnnnnnnnnnnnnnnnnnnnnnnnnnnnnnnnnnnnnnnnnnnnnnnnnnnnnnnnnnnnnnnnnnnnnnnnnnnnnnnnnnnnnnnnnnnnnnnnnnnnnnnnnnnnnnnnnnnnnnnnnnnnnnnnnnnnnnnnnnnnnnnnnnnnnnnnnnnnnnnnnnnnnnnnnnnnnnnnnnnnnnnnnnnnnnnnnnnnnnnnnnnnnnnnnnnnnnnnnnnnnnnnnnnnnnnnnnnnnnnnnnnnnnnnnnnnnnnnnnnnnnnnnnnnnnnnnnnnnnnnnnnnnnnnnnnnnnnnnnnnnnnnnnnnnnnnnnnnnnnnnnnnnnnnnnnnnnnnnnnnnnnnnnnnnnnnnnnnnnnnnnnnnnnnnnnnnnnnnnnnnnnnnnnnnnnnnnnnnnnnnnnnnnnnnnnnnnnnnnnnnnnnnnnnnnnnnnnnnnnnnnnnnnnnnnnnnnnnnnnnnnnnnnnnnnnnnnnnnnnnnnnnnnnnnnnnnnnnnnnnnnnnnnnnnnnnnnnnnnnnnnnnnnnnnnnnnnnnnnnnnnnnnnnnnnnnnnnnnnnnnnnnnnnnnnnnnnnnnnnnnnnnnnnnnnnnnnnnnnnnnnnnnnnnnnnnnnnnnnnnnnnnnnnnnnnnnnnnnnnnnnnnnnnnnnnnnnnnnnnnnnnnnnnnnnnnnnnnnnnnnnnnnnnnnnnnnnnnnnnnnnnnnnnnnnnnnnnnnnnnnnnnnnnnnnnnnnnnnnnnnnnnnnnnnnnnnnnnnnnnnnnnnnnnnnnnnnnnnnnnnnnnnnnnnnnnnnnnnnnnnnnnnnnnnnnnnnnnnnnnnnnnnnnnnnnnnnnnnnnnnnnnnnnnnnnnnnnnnnnnnnnnnnnnnnnnnnnnnnnnnnnnnnnnnnnnnnnnnnnnnnnnnnnnnnnnnnnnnnnnnnnnnnnnnnnnnnnnnnnnnnnnnnnnnnnnnnnnnnnnnnnnnnnnnnnnnnnnnnnnnnnnnnnnnnnnnnnnnnnnnnnnnnnnnnnnnnnnnnnnnnnnnnnnnnnnnnnnnnnnnnnnnnnnnnnnnnnnnnnnnnnnnnnnnnnnnnnnnnnnnnnnnnnnnnnnnnnnnnnnnnnnnnnnnnnnnnnnnnnnnnnnnnnnnnnnnnnnnnnnnnnnnnnnnnnnnnnnnnnnnnnnnnnnnnnnnnnnnnnnnnnnnnnnnnnnnnnnnnnnnnnnnnnnnnnnnnnnnnnnnnnnnnnnnnnnnnnnnnnnnnnnnnnnnnnnnnnnnnnnnnnnnnnnnnnnnnnnnnnnnnnnnnnnnnnnnnnnnnnnnnnnnnnnnnnnnnnnnnnnnnnnnnnnnnnnnnnnnnnnnnnnnnnnnnnnnnnnnnnnnnnnnnnnnnnnnnnnnnnnnnnnnnnnnnnnnnnnnnnnnnnnnnnnnnnnnnnnnnnnnnnnnnnnnnnnnnnnnnnnnnnnnnnnnnnnnnnnnnnnnnnnnnnnnnnnnnnnnnnnnnnnnnnnnnnnnnnnnnnnnnnnnnnnnnnnnnnnnnnnnnnnnnnnnnnnnnnnnnnnnnnnnnnnnnnnnnnnnnnnnnnnnnnnnnnnnnnnnnnnnnnnnnnnnnnnnnnnnnnnnnnnnnnnnnnnnnnnnnnnnnnnnnnnnnnnnnnnnnnnnnnnnnnnnnnnnnnnnnnnnnnnnnnnnnnnnnnnnnnnnnnnnnnnnnnnnnnnnnnnnnnnnnnnnnnnnnnnnnnnnnnnnnnnnnnnnnnnnnnnnnnnnnnnnnnnnnnnnnnnnnnnnnnnnnnnnnnnnnnnnnnnnnnnnnnnnnnnnnnnnnnnnnnnnnnnnnnnnnnnnnnnnnnnnnnnnnnnnnnnnnnnnnnnnnnnnnnnnnnnnnnnnnnnnnnnnnnnnnnnnnnnnnnnnnnnnnnnnnnnnnnnnnnnnnnnnnnnnnnnnnnnnnnnnnnnnnnnnnnnnnnnnnnnnnnnnnnnnnnnnnnnnnnnnnnnnnnnnnnnnnnnnnnnnnnnnnnnnnnnnnnnnnnnnnnnnnnnnnnnnnnnnnnnnnnnnnnnnnnnnnnnnnnnnnnnnnnnnnnnnnnnnnnnnnnnnnnnnnnnnnnnnnnnnnnnnnnnnnnnnnnnnnnnnnnnnnnnnnnnnnnnnnnnnnnnnnnnnnnnnnnnnnnnnnnnnnnnnnnnnnnnnnnnnnnnnnnnnnnnnnnnnnnnnnnnnnnnnnnnnnnnnnnnnnnnnnnnnnnnnnnnnnnnnnnnnnnnnnnnnnnnnnnnnnnnnnnnnnnnnnnnnnnnnnnnnnnnnnnnnnnnnnnnnnnnnnnnnnnnnnnnnnnnnnnnnnnnnnnnnnnnnnnnnnnnnnnnnnnnnnnnnnnnnnnnnnnnnnnnnnnnnnnnnnnnnnnnnnnnnnnnnnnnnnnnnnnnnnnnnnnnnnnnnnnnnnnnnnnnnnnnnnnnnnnnnnnnnnnnnnnnnnnnnnnnnnnnnnnnnnnnnnnnnnnnnnnnnnnnnnnnnnnnnnnnnnnnnnnnnnnnnnnnnnnnnnnnnnnnnnnnnnnnnnnnnnnnnnnnnnnnnnnnnnnnnnnnnnnnnnnnnnnnnnnnnnnnnnnnnnnnnnnnnnnnnnnnnnnnnnnnnnnnnnnnnnnnnnnnnnnnnnnnnnnnnnnnnnnnnnnnnnnnnnnnnnnnnnnnnnnnnnnnnnnnnnnnnnnnnnnnnnnnnnnnnnnnnnnnnnnnnnnnnnnnnnnnnnnnnnnnnnnnnnnnnnnnnnnnnnnnnnnnnnnnnnnnnnnnnnnnnnnnnnnnnnnnnnnnnnnnnnnnnnnnnnnnnnnnnnnnnnnnnnnnnnnnnnnnnnnnnnnnnnnnnnnnnnnnnnnnnnnnnnnnnnnnnnnnnnnnnnnnnnnnnnnnnnnnnnnnnnnnnnnnnnnnnnnnnnnnnnnnnnnnnnnnnnnnnnnnnnnnnnnnnnnnnnnnnnnnnnnnnnnnnnnnnnnnnnnnnnnnnnnnnnnnnnnnnnnnnnnnnnnnnnnnnnnnnnnnnnnnnnnnnnnnnnnnnnnnnnnnnnnnnnnnnnnnnnnnnnnnnnnnnnnnnnnnnnnnnnnnnnnnnnnnnnnnnnnnnnnnnnnnnnnnnnnnnnnnnnnnnnnnnnnnnnnnnnnnnnnnnnnnnnnnnnnnnnnnnnnnnnnnnnnnnnnnnnnnnnnnnnnnnnnnnnnnnnnnnnnnnnnnnnnnnnnnnnnnnnnnnnnnnnnnnnnnnnnnnnnnnnnnnnnnnnnnnnnnnnnnnnnnnnnnnnnnnnnnnnnnnnnnnnnnnnnnnnnnnnnnnnnnnnnnnnnnnnnnnnnnnnnnnnnnnnnnnnnnnnnnnnnnnnnnnnnnnnnnnnnnnnnnnnnnnnnnnnnnnnnnnnnnnnnnnnnnnnnnnnnnnnnnnnnnnnnnnnnnnnnnnnnnnnnnnnnnnnnnnnnnnnnnnnnnnnnnnnnnnnnnnnnnnnnnnnnnnnnnnnnnnnnnnnnnnnnnnnnnnnnnnnnnnnnnnnnnnnnnnnnnnnnnnnnnnnnnnnnnnnnnnnnnnnnnnnnnnnnnnnnnnnnnnnnnnnnnnnnnnnnnnnnnnnnnnnnnnnnnnnnnnnnnnnnnnnnnnnnnnnnnnnnnnnnnnnnnnnnnnnnnnnnnnnnnnnnnnnnnnnnnnnnnnnnnnnnnnnnnnnnnnnnnnnnnnnnnnnnnnnnnnnnnnnnnnnnnnnnnnnnnnnnnnnnnnnnnnnnnnnnnnnnnnnnnnnnnnnnnnnnnnnnnnnnnnnnnnnnnnnnnnnnnnnnnnnnnnnnnnnnnnnnnnnnnnnnnnnnnnnnnnnnnnnnnnnnnnnnnnnnnnnnnnnnnnnnnnnnnnnnnnnnnnnnnnnnnnnnnnnnnnnnnnnnnnnnnnnnnnnnnnnnnnnnnnnnnnnnnnnnnnnnnnnnnnnnnnnnnnnnnnnnnnnnnnnnnnnnnnnnnnnnnnnnnnnnnnnnnnnnnnnnnnnnnnnnnnnnnnnnnnnnnnnnnnnnnnnnnnnnnnnnnnnnnnnnnnnnnnnnnnnnnnnnnnnnnnnnnnnnnnnnnnnnnnnnnnnnnnnnnnnnnnnnnnnnnnnnnnnnnnnnnnnnnnnnnnnnnnnnnnnnnnnnnnnnnnnnnnnnnnnnnnnnnnnnnnnnnnnnnnnnnnnnnnnnnnnnnnnnnnnnnnnnnnnnnnnnnnnnnnnnnnnnnnnnnnnnnnnnnnnnnnnnnnnnnnnnnnnnnnnnnnnnnnnnnnnnnnnnnnnnnnnnnnnnnnnnnnnnnnnnnnnnnnnnnnnnnnnnnnnnnnnnnnnnnnnnnnnnnnnnnnnnnnnnnnnnnnnnnnnnnnnnnnnnnnnnnnnnnnnnnnnnnnnnnnnnnnnnnnnnnnnnnnnnnnnnnnnnnnnnnnnnnnnnnnnnnnnnnnnnnnnnnnnnnnnnnnnnnnnnnnnnnnnnnnnnnnnnnnnnnnnnnnnnnnnnnnnnnnnnnnnnnnnnnnnnnnnnnnnnnnnnnnnnnnnnnnnnnnnnnnnnnnnnnnnnnnnnnnnnnnnnnnnnnnnnnnnnnnnnnnnnnnnnnnnnnnnnnnnnnnnnnnnnnnnnnnnnnnnnnnnnnnnnnnnnnnnnnnnnnnnnnnnnnnnnnnnnnnnnnnnnnnnnnnnnnnnnnnnnnnnnnnnnnnnnnnnnnnnnnnnnnnnnnnnnnnnnnnnnnnnnnnnnnnnnnnnnnnnnnnnnnnnnnnnnnnnnnnnnnnnnnnnnnnnnnnnnnnnnnnnnnnnnnnnnnnnnnnnnnnnnnnnnnnnnnnnnnnnnnnnnnnnnnnnnnnnnnnnnnnnnnnnnnnnnnnnnnnnnnnnnnnnnnnnnnnnnnnnnnnnnnnnnnnnnnnnnnnnnnnnnnnnnnnnnnnnnnnnnnnnnnnnnnnnnnnnnnnnnnnnnnnnnnnnnnnnnnnnnnnnnnnnnnnnnnnnnnnnnnnnnnnnnnnnnnnnnnnnnnnnnnnnnnnnnnnnnnnnnnnnnnnnnnnnnnnnnnnnnnnnnnnnnnnnnnnnnnnnnnnnnnnnnnnnnnnnnnnnnnnnnnnnnnnnnnnnnnnnnnnnnnnnnnnnnnnnnnnnnnnnnnnnnnnnnnnnnnnnnnnnnnnnnnnnnnnnnnnnnnnnnnnnnnnnnnnnnnnnnnnnnnnnnnnnnnnnnnnnnnnnnnnnnnnnnnnnnnnnnnnnnnnnnnnnnnnnnnnnnnnnnnnnnnnnnnnnnnnnnnnnnnnnnnnnnnnnnnnnnnnnnnnnnnnnnnnnnnnnnnnnnnnnnnnnnnnnnnnnnnnnnnnnnnnnnnnnnnnnnnnnnnnnnnnnnnnnnnnnnnnnnnnnnnnnnnnnnnnnnnnnnnnnnnnnnnnnnnnnnnnnnnnnnnnnnnnnnnnnnnnnnnnnnnnnnnnnnnnnnnnnnnnnnnnnnnnnnnnnnnnnnnnnnnnnnnnnnnnnnnnnnnnnnnnnnnnnnnnnnnnnnnnnnnnnnnnnnnnnnnnnnnnnnnnnnnnnnnnnnnnnnnnnnnnnnnnnnnnnnnnnnnnnnnnnnnnnnnnnnnnnnnnnnnnnnnnnnnnnnnnnnnnnnnnnnnnnnnnnnnnnnnnnnnnnnnnnnnnnnnnnnnnnnnnnnnnnnnnnnnnnnnnnnnnnnnnnnnnnnnnnnnnnnnnnnnnnnnnnnnnnnnnnnnnnnnnnnnnnnnnnnnnnnnnnnnnnnnnnnnnnnnnnnnnnnnnnnnnnnnnnnnnnnnnnnnnnnnnnnnnnnnnnnnnnnnnnnnnnnnnnnnnnnnnnnnnnnnnnnnnnnnnnnnnnnnnnnnnnnnnnnnnnnnnnnnnnnnnnnnnnnnnnnnnnnnnnnnnnnnnnnnnnnnnnnnnnnnnnnnnnnnnnnnnnnnnnnnnnnnnnnnnnnnnnnnnnnnnnnnnnnnnnnnnnnnnnnnnnnnnnnnnnnnnnnnnnnnnnnnnnnnnnnnnnnnnnnnnnnnnnnnnnnnnnnnnnnnnnnnnnnnnnnnnnnnnnnnnnnnnnnnnnnnnnnnnnnnnnnnnnnnnnnnnnnnnnnnnnnnnnnnnnnnnnnnnnnnnnnnnnnnnnnnnnnnnnnnnnnnnnnnnnnnnnnnnnnnnnnnnnnnnnnnnnnnnnnnnnnnnnnnnnnnnnnnnnnnnnnnnnnnnnnnnnnnnnnnnnnnnnnnnnnnnnnnnnnnnnnnnnnnnnnnnnnnnnnnnnnnnnnnnnnnnnnnnnnnnnnnnnnnnnnnnnnnnnnnnnnnnnnnnnnnnnnnnnnnnnnnnnnnnnnnnnnnnnnnnnnnnnnnnnnnnnnnnnnnnnnnnnnnnnnnnnnnnnnnnnnnnnnnnnnnnnnnnnnnnnnnnnnnnnnnnnnnnnnnnnnnnnnnnnnnnnnnnnnnnnnnnnnnnnnnnnnnnnnnnnnnnnnnnnnnnnnnnnnnnnnnnnnnnnnnnnnnnnnnnnnnnnnnnnnnnnnnnnnnnnnnnnnnnnnnnnnnnnnnnnnnnnnnnnnnnnnnnnnnnnnnnnnnnnnnnnnnnnnnnnnnnnnnnnnnnnnnnnnnnnnnnnnnnnnnnnnnnnnnnnnnnnnnnnnnnnnnnnnnnnnnnnnnnnnnnnnnnnnnnnnnnnnnnnnnnnnnnnnnnnnnnnnnnnnnnnnnnnnnnnnnnnnnnnnnnnnnnnnnnnnnnnnnnnnnnnnnnnnnnnnnnnnnnnnnnnnnnnnnnnnnnnnnnnnnnnnnnnnnnnnnnnnnnnnnnnnnnnnnnnnnnnnnnnnnnnnnnnnnnnnnnnnnnnnnnnnnnnnnnnnnnnnnnnnnnnnnnnnnnnnnnnnnnnnnnnnnnnnnnnnnnnnnnnnnnnnnnnnnnnnnnnnnnnnnnnnnnnnnnnnnnnnnnnnnnnnnnnnnnnnnnnnnnnnnnnnnnnnnnnnnnnnnnnnnnnnnnnnnnnnnnnnnnnnnnnnnnnnnnnnnnnnnnnnnnnnnnnnnnnnnnnnnnnnnnnnnnnnnnnnnnnnnnnnnnnnnnnnnnnnnnnnnnnnnnnnnnnnnnnnnnnnnnnnnnnnnnnnnnnnnnnnnnnnnnnnnnnnnnnnnnnnnnnnnnnnnnnnnnnnnnnnnnnnnnnnnnnnnnnnnnnnnnnnnnnnnnnnnnnnnnnnnnnnnnnnnnnnnnnnnnnnnnnnnnnnnnnnnnnnnnnnnnnnnnnnnnnnnnnnnnnnnnnnnnnnnnnnnnnnnnnnnnnnnnnnnnnnnnnnnnnnnnnnnnnnnnnnnnnnnnnnnnnnnnnnnnnnnnnnnnnnnnnnnnnnnnnnnnnnnnnnnnnnnnnnnnnnnnnnnnnnnnnnnnnnnnnnnnnnnnnnnnnnnnnnnnnnnnnnnnnnnnnnnnnnnnnnnnnnnnnnnnnnnnnnnnnnnnnnnnnnnnnnnnnnnnnnnnnnnnnnnnnnnnnnnnnnnnnnnnnnnnnnnnnnnnnnnnnnnnnnnnnnnnnnnnnnnnnnnnnnnnnnnnnnnnnnnnnnnnnnnnnnnnnnnnnnnnnnnnnnnnnnnnnnnnnnnnnnnnnnnnnnnnnnnnnnnnnnnnnnnnnnnnnnnnnnnnnnnnnnnnnnnnnnnnnnnnnnnnnnnnnnnnnnnnnnnnnnnnnnnnnnnnnnnnnnnnnnnnnnnnnnnnnnnnnnnnnnnnnnnnnnnnnnnnnnnnnnnnnnnnnnnnnnnnnnnnnnnnnnnnnnnnnnnnnnnnnnnnnnnnnnnnnnnnnnnnnnnnnnnnnnnnnnnnnnnnnnnnnnnnnnnnnnnnnnnnnnnnnnnnnnnnnnnnnnnnnnnnnnnnnnnnnnnnnnnnnnnnnnnnnnnnnnnnnnnnnnnnnnnnnnnnnnnnnnnnnnnnnnnnnnnnnnnnnnnnnnnnnnnnnnnnnnnnnnnnnnnnnnnnnnnnnnnnnnnnnnnnnnnnnnnnnnnnnnnnnnnnnnnnnnnnnnnnnnnnnnnnnnnnnnnnnnnnnnnnnnnnnnnnnnnnnnnnnnnnnnnnnnnnnnnnnnnnnnnnnnnnnnnnnnnnnnnnnnnnnnnnnnnnnnnnnnnnnnnnnnnnnnnnnnnnnnnnnnnnnnnnnnnnnnnnnnnnnnnnnnnnnnnnnnnnnnnnnnnnnnnnnnnnnnnnnnnnnnnnnnnnnnnnnnnnnnnnnnnnnnnnnnnnnnnnnnnnnnnnnnnnnnnnnnnnnnnnnnnnnnnnnnnnnnnnnnnnnnnnnnnnnnnnnnnnnnnnnnnnnnnnnnnnnnnnnnnnnnnnnnnnnnnnnnnnnnnnnnnnnnnnnnnnnnnnnnnnnnnnnnnnnnnnnnnnnnnnnnnnnnnnnnnnnnnnnnnnnnnnnnnnnnnnnnnnnnnnnnnnnnnnnnnnnnnnnnnnnnnnnnnnnnnnnnnnnnnnnnnnnnnnnnnnnnnnnnnnnnnnnnnnnnnnnnnnnnnnnnnnnnnnnnnnnnnnnnnnnnnnnnnnnnnnnnnnnnnnnnnnnnnnnnnnnnnnnnnnnnnnnnnnnnnnnnnnnnnnnnnnnnnnnnnnnnnnnnnnnnnnnnnnnnnnnnnnnnnnnnnnnnnnnnnnnnnnnnnnnnnnnnnnnnnnnnnnnnnnnnnnnnnnnnnnnnnnnnnnnnnnnnnnnnnnnnnnnnnnnnnnnnnnnnnnnnnnnnnnnnnnnnnnnnnnnnnnnnnnnnnnnnnnnnnnnnnnnnnnnnnnnnnnnnnnnnnnnnnnnnnnnnnnnnnnnnnnnnnnnnnnnnnnnnnnnnnnnnnnnnnnnnnnnnnnnnnnnnnnnnnnnnnnnnnnnnnnnnnnnnnnnnnnnnnnnnnnnnnnnnnnnnnnnnnnnnnnnnnnnnnnnnnnnnnnnnnnnnnnnnnnnnnnnnnnnnnnnnnnnnnnnnnnnnnnnnnnnnnnnnnnnnnnnnnnnnnnnnnnnnnnnnnnnnnnnnnnnnnnnnnnnnnnnnnnnnnnnnnnnnnnnnnnnnnnnnnnnnnnnnnnnnnnnnnnnnnnnnnnnnnnnnnnnnnnnnnnnnnnnnnnnnnnnnnnnnnnnnnnnnnnnnnnnnnnnnnnnnnnnnnnnnnnnnnnnnnnnnnnnnnnnnnnnnnnnnnnnnnnnnnnnnnnnnnnnnnnnnnnnnnnnnnnnnnnnnnnnnnnnnnnnnnnnnnnnnnnnnnnnnnnnnnnnnnnnnnnnnnnnnnnnnnnnnnnnnnnnnnnnnnnnnnnnnnnnnnnnnnnnnnnnnnnnnnnnnnnnnnnnnnnnnnnnnnnnnnnnnnnnnnnnnnnnnnnnnnnnnnnnnnnnnnnnnnnnnnnnnnnnnnnnnnnnnnnnnnnnnnnnnnnnnnnnnnnnnnnnnnnnnnnnnnnnnnnnnnnnnnnnnnnnnnnnnnnnnnnnnnnnnnnnnnnnnnnnnnnnnnnnnnnnnnnnnnnnnnnnnnnnnnnnnnnnnnnnnnnnnnnnnnnnnnnnnnnnnnnnnnnnnnnnnnnnnnnnnnnnnnnnnnnnnnnnnnnnnnnnnnnnnnnnnnnnnnnnnnnnnnnnnnnnnnnnnnnnnnnnnnnnnnnnnnnnnnnnnnnnnnnnnnnnnnnnnnnnnnnnnnnnnnnnnnnnnnnnnnnnnnnnnnnnnnnnnnnnnnnnnnnnnnnnnnnnnnnnnnnnnnnnnnnnnnnnnnnnnnnnnnnnnnnnnnnnnnnnnnnnnnnnnnnnnnnnnnnnnnnnnnnnnnnnnnnnnnnnnnnnnnnnnnnnnnnnnnnnnnnnnnnnnnnnnnnnnnnnnnnnnnnnnnnnnnnnnnnnnnnnnnnnnnnnnnnnnnnnnnnnnnnnnnnnnnnnnnnnnnnnnnnnnnnnnnnnnnnnnnnnnnnnnnnnnnnnnnnnnnnnnnnnnnnnnnnnnnnnnnnnnnnnnnnnnnnnnnnnnnnnnnnnnnnnnnnnnnnnnnnnnnnnnnnnnnnnnnnnnnnnnnnnnnnnnnnnnnnnnnnnnnnnnnnnnnnnnnnnnnnnnnnnnnnnnnnnnnnnnnnnnnnnnnnnnnnnnnnnnnnnnnnnnnnnnnnnnnnnnnnnnnnnnnnnnnnnnnnnnnnnnnnnnnnnnnnnnnnnnnnnnnnnnnnnnnnnnnnnnnnnnnnnnnnnnnnnnnnnnnnnnnnnnnnnnnnnnnnnnnnnnnnnnnnnnnnnnnnnnnnnnnnnnnnnnnnnnnnnnnnnnnnnnnnnnnnnnnnnnnnnnnnnnnnnnnnnnnnnnnnnnnnnnnnnnnnnnnnnnnnnnnnnnnnnnnnnnnnnnnnnnnnnnnnnnnnnnnnnnnnnnnnnnnnnnnnnnnnnnnnnnnnnnnnnnnnnnnnnnnnnnnnnnnnnnnnnnnnnnnnnnnnnnnnnnnnnnnnnnnnnnnnnnnnnnnnnnnnnnnnnnnnnnnnnnnnnnnnnnnnnnnnnnnnnnnnnnnnnnnnnnnnnnnnnnnnnnnnnnnnnnnnnnnnnnnnnnnnnnnnnnnnnnnnnnnnnnnnnnnnnnnnnnnnnnnnnnnnnnnnnnnnnnnnnnnnnnnnnnnnnnnnnnnnnnnnnnnnnnnnnnnnnnnnnnnnnnnnnnnnnnnnnnnnnnnnnnnnnnnnnnnnnnnnnnnnnnnnnnnnnnnnnnnnnnnnnnnnnnnnnnnnnnnnnnnnnnnnnnnnnnnnnnnnnnnnnnnnnnnnnnnnnnnnnnnnnnnnnnnnnnnnnnnnnnnnnnnnnnnnnnnnnnnnnnnnnnnnnnnnnnnnnnnnnnnnnnnnnnnnnnnnnnnnnnnnnnnnnnnnnnnnnnnnnnnnnnnnnnnnnnnnnnnnnnnnnnnnnnnnnnnnnnnnnnnnnnnnnnnnnnnnnnnnnnnnnnnnnnnnnnnnnnnnnnnnnnnnnnnnnnnnnnnnnnnnnnnnnnnnnnnnnnnnnnnnnnnnnnnnnnnnnnnnnnnnnnnnnnnnnnnnnnnnnnnnnnnnnnnnnnnnnnnnnnnnnnnnnnnnnnnnnnnnnnnnnnnnnnnnnnnnnnnnnnnnnnnnnnnnnnnnnnnnnnnnnnnnnnnnnnnnnnnnnnnnnnnnnnnnnnnnnnnnnnnnnnnnnnnnnnnnnnnnnnnnnnnnnnnnnnnnnnnnnnnnnnnnnnnnnnnnnnnnnnnnnnnnnnnnnnnnnnnnnnnnnnnnnnnnnnnnnnnnnnnnnnnnnnnnnnnnnnnnnnnnnnnnnnnnnnnnnnnnnnnnnnnnnnnnnnnnnnnnnnnnnnnnnnnnnnnnnnnnnnnnnnnnnnnnnnnnnnnnnnnnnnnnnnnnnnnnnnnnnnnnnnnnnnnnnnnnnnnnnnnnnnnnnnnnnnnnnnnnnnnnnnnnnnnnnnnnnnnnnnnnnnnnnnnnnnnnnnnnnnnnnnnnnnnnnnnnnnnnnnnnnnnnnnnnnnnnnnnnnnnnnnnnnnnnnnnnnnnnnnnnnnnnnnnnnnnnnnnnnnnnnnnnnnnnnnnnnnnnnnnnnnnnnnnnnnnnnnnnnnnnnnnnnnnnnnnnnnnnnnnnnnnnnnnnnnnnnnnnnnnnnnnnnnnnnnnnnnnnnnnnnnnnnnnnnnnnnnnnnnnnnnnnnnnnnnnnnnnnnnnnnnnnnnnnnnnnnnnnnnnnnnnnnnnnnnnnnnnnnnnnnnnnnnnnnnnnnnnnnnnnnnnnnnnnnnnnnnnnnnnnnnnnnnnnnnnnnnnnnnnnnnnnnnnnnnnnnnnnnnnnnnnnnnnnnnnnnnnnnnnnnnnnnnnnnnnnnnnnnnnnnnnnnnnnnnnnnnnnnnnnnnnnnnnnnnnnnnnnnnnnnnnnnnnnnnnnnnnnnnnnnnnnnnnnnnnnnnnnnnnnnnnnnnnnnnnnnnnnnnnnnnnnnnnnnnnnnnnnnnnnnnnnnnnnnnnnnnnnnnnnnnnnnnnnnnnnnnnnnnnnnnnnnnnnnnnnnnnnnnnnnnnnnnnnnnnnnnnnnnnnnnnnnnnnnnnnnnnnnnnnnnnnnnnnnnnnnnnnnnnnnnnnnnnnnnnnnnnnnnnnnnnnnnnnnnnnnnnnnnnnnnnnnnnnnnnnnnnnnnnnnnnnnnnnnnnnnnnnnnnnnnnnnnnnnnnnnnnnnnnnnnnnnnnnnnnnnnnnnnnnnnnnnnnnnnnnnnnnnnnnnnnnnnnnnnnnnnnnnnnnnnnnnnnnnnnnnnnnnnnnnnnnnnnnnnnnnnnnnnnnnnnnnnnnnnnnnnnnnnnnnnnnnnnnnnnnnnnnnnnnnnnnnnnnnnnnnnnnnnnnnnnnnnnnnnnnnnnnnnnnnnnnnnnnnnnnnnnnnnnnnnnnnnnnnnnnnnnnnnnnnnnnnnnnnnnnnnnnnnnnnnnnnnnnnnnnnnnnnnnnnnnnnnnnnnnnnnnnnnnnnnnnnnnnnnnnnnnnnnnnnnnnnnnnnnnnnnnnnnnnnnnnnnnnnnnnnnnnnnnnnnnnnnnnnnnnnnnnnnnnnnnnnnnnnnnnnnnnnnnnnnnnnnnnnnnnnnnnnnnnnnnnnnnnnnnnnnnnnnnnnnnnnnnnnnnnnnnnnnnnnnnnnnnnnnnnnnnnnnnnnnnnnnnnnnnnnnnnnnnnnnnnnnnnnnnnnnnnnnnnnnnnnnnnnnnnnnnnnnnnnnnnnnnnnnnnnnnnnnnnnnnnnnnnnnnnnnnnnnnnnnnnnnnnnnnnnnnnnnnnnnnnnnnnnnnnnnnnnnnnnnnnnnnnnnnnnnnnnnnnnnnnnnnnnnnnnnnnnnnnnnnnnnnnnnnnnnnnnnnnnnnnnnnnnnnnnnnnnnnnnnnnnnnnnnnnnnnnnnnnnnnnnnnnnnnnnnnnnnnnnnnnnnnnnnnnnnnnnnnnnnnnnnnnnnnnnnnnnnnnnnnnnnnnnnnnnnnnnnnnnnnnnnnnnnnnnnnnnnnnnnnnnnnnnnnnnnnnnnnnnnnnnnnnnnnnnnnnnnnnnnnnnnnnnnnnnnnnnnnnnnnnnnnnnnnnnnnnnnnnnnnnnnnnnnnnnnnnnnnnnnnnnnnnnnnnnnnnnnnnnnnnnnnnnnnnnnnnnnnnnnnnnnnnnnnnnnnnnnnnnnnnnnnnnnnnnnnnnnnnnnnnnnnnnnnnnnnnnnnnnnnnnnnnnnnnnnnnnnnnnnnnnnnnnnnnnnnnnnnnnnnnnnnnnnnnnnnnnnnnnnnnnnnnnnnnnnnnnnnnnnnnnnnnnnnnnnnnnnnnnnnnnnnnnnnnnnnnnnnnnnnnnnnnnnnnnnnnnnnnnnnnnnnnnnnnnnnnnnnnnnnnnnnnnnnnnnnnnnnnnnnnnnnnnnnnnnnnnnnnnnnnnnnnnnnnnnnnnnnnnnnnnnnnnnnnnnnnnnnnnnnnnnnnnnnnnnnnnnnnnnnnnnnnnnnnnnnnnnnnnnnnnnnnnnnnnnnnnnnnnnnnnnnnnnnnnnnnnnnnnnnnnnnnnnnnnnnnnnnnnnnnnnnnnnnnnnnnnnnnnnnnnnnnnnnnnnnnnnnnnnnnnnnnnnnnnnnnnnnnnnnnnnnnnnnnnnnnnnnnnnnnnnnnnnnnnnnnnnnnnnnnnnnnnnnnnnnnnnnnnnnnnnnnnnnnnnnnnnnnnnnnnnnnnnnnnnnnnnnnnnnnnnnnnnnnnnnnnnnnnnnnnnnnnnnnnnnnnnnnnnnnnnnnnnnnnnnnnnnnnnnnnnnnnnnnnnnnnnnnnnnnnnnnnnnnnnnnnnnnnnnnnnnnnnnnnnnnnnnnnnnnnnnnnnnnnnnnnnnnnnnnnnnnnnnnnnnnnnnnnnnnnnnnnnnnnnnnnnnnnnnnnnnnnnnnnnnnnnnnnnnnnnnnnnnnnnnnnnnnnnnnnnnnnnnnnnnnnnnnnnnnnnnnnnnnnnnnnnnnnnnnnnnnnnnnnnnnnnnnnnnnnnnnnnnnnnnnnnnnnnnnnnnnnnnnnnnnnnnnnnnnnnnnnnnnnnnnnnnnnnnnnnnnnnnnnnnnnnnnnnnnnnnnnnnnnnnnnnnnnnnnnnnnnnnnnnnnnnnnnnnnnnnnnnnnnnnnnnnnnnnnnnnnnnnnnnnnnnnnnnnnnnnnnnnnnnnnnnnnnnnnnnnnnnnnnnnnnnnnnnnnnnnnnnnnnnnnnnnnnnnnnnnnnnnnnnnnnnnnnnnnnnnnnnnnnnnnnnnnnnnnnnnnnnnnnnnnnnnnnnnnnnnnnnnnnnnnnnnnnnnnnnnnnnnnnnnnnnnnnnnnnnnnnnnnnnnnnnnnnnnnnnnnnnnnnnnnnnnnnnnnnnnnnnnnnnnnnnnnnnnnnnnnnnnnnnnnnnnnnnnnnnnnnnnnnnnnnnnnnnnnnnnnnnnnnnnnnnnnnnnnnnnnnnnnnnnnnnnnnnnnnnnnnnnnnnnnnnnnnnnnnnnnnnnnnnnnnnnnnnnnnnnnnnnnnnnnnnnnnnnnnnnnnnnnnnnnnnnnnnnnnnnnnnnnnnnnnnnnnnnnnnnnnnnnnnnnnnnnnnnnnnnnnnnnnnnnnnnnnnnnnnnnnnnnnnnnnnnnnnnnnnnnnnnnnnnnnnnnnnnnnnnnnnnnnnnnnnnnnnnnnnnnnnnnnnnnnnnnnnnnnnnnnnnnnnnnnnnnnnnnnnnnnnnnnnnnnnnnnnnnnnnnnnnnnnnnnnnnnnnnnnnnnnnnnnnnnnnnnnnnnnnnnnnnnnnnnnnnnnnnnnnnnnnnnnnnnnnnnnnnnnnnnnnnnnnnnnnnnnnnnnnnnnnnnnnnnnnnnnnnnnnnnnnnnnnnnnnnnnnnnnnnnnnnnnnnnnnnnnnnnnnnnnnnnnnnnnnnnnnnnnnnnnnnnnnnnnnnnnnnnnnnnnnnnnnnnnnnnnnnnnnnnnnnnnnnnnnnnnnnnnnnnnnnnnnnnnnnnnnnnnnnnnnnnnnnnnnnnnnnnnnnnnnnnnnnnnnnnnnnnnnnnnnnnnnnnnnnnnnnnnnnnnnnnnnnnnnnnnnnnnnnnnnnnnnnnnnnnnnnnnnnnnnnnnnnnnnnnnnnnnnnnnnnnnnnnnnnnnnnnnnnnnnnnnnnnnnnnnnnnnnnnnnnnnnnnnnnnnnnnnnnnnnnnnnnnnnnnnnnnnnnnnnnnnnnnnnnnnnnnnnnnnnnnnnnnnnnnnnnnnnnnnnnnnnnnnnnnnnnnnnnnnnnnnnnnnnnnnnnnnnnnnnnnnnnnnnnnnnnnnnnnnnnnnnnnnnnnnnnnnnnnnnnnnnnnnnnnnnnnnnnnnnnnnnnnnnnnnnnnnnnnnnnnnnnnnnnnnnnnnnnnnnnnnnnnnnnnnnnnnnnnnnnnnnnnnnnnnnnnnnnnnnnnnnnnnnnnnnnnnnnnnnnnnnnnnnnnnnnnnnnnnnnnnnnnnnnnnnnnnnnnnnnnnnnnnnnnnnnnnnnnnnnnnnnnnnnnnnnnnnnnnnnnnnnnnnnnnnnnnnnnnnnnnnnnnnnnnnnnnnnnnnnnnnnnnnnnnnnnnnnnnnnnnnnnnnnnnnnnnnnnnnnnnnnnnnnnnnnnnnnnnnnnnnnnnnnnnnnnnnnnnnnnnnnnnnnnnnnnnnnnnnnnnnnnnnnnnnnnnnnnnnnnnnnnnnnnnnnnnnnnnnnnnnnnnnnnnnnnnnnnnnnnnnnnnnnnnnnnnnnnnnnnnnnnnnnnnnnnnnnnnnnnnnnnnnnnnnnnnnnnnnnnnnnnnnnnnnnnnnnnnnnnnnnnnnnnnnnnnnnnnnnnnnnnnnnnnnnnnnnnnnnnnnnnnnnnnnnnnnnnnnnnnnnnnnnnnnnnnnnnnnnnnnnnnnnnnnnnnnnnnnnnnnnnnnnnnnnnnnnnnnnnnnnnnnnnnnnnnnnnnnnnnnnnnnnnnnnnnnnnnnnnnnnnnnnnnnnnnnnnnnnnnnnnnnnnnnnnnnnnnnnnnnnnnnnnnnnnnnnnnnnnnnnnnnnnnnnnnnnnnnnnnnnnnnnnnnnnnnnnnnnnnnnnnnnnnnnnnnnnnnnnnnnnnnnnnnnnnnnnnnnnnnnnnnnnnnnnnnnnnnnnnnnnnnnnnnnnnnnnnnnnnnnnnnnnnnnnnnnnnnnnnnnnnnnnnnnnnnnnnnnnnnnnnnnnnnnnnnnnnnnnnnnnnnnnnnnnnnnnnnnnnnnnnnnnnnnnnnnnnnnnnnnnnnnnnnnnnnnnnnnnnnnnnnnnnnnnnnnnnnnnnnnnnnnnnnnnnnnnnnnnnnnnnnnnnnnnnnnnnnnnnnnnnnnnnnnnnnnnnnnnnnnnnnnnnnnnnnnnnnnnnnnnnnnnnnnnnnnnnnnnnnnnnnnnnnnnnnnnnnnnnnnnnnnnnnnnnnnnnnnnnnnnnnnnnnnnnnnnnnnnnnnnnnnnnnnnnnnnnnnnnnnnnnnnnnnnnnnnnnnnnnnnnnnnnnnnnnnnnnnnnnnnnnnnnnnnnnnnnnnnnnnnnnnnnnnnnnnnnnnnnnnnnnnnnnnnnnnnnnnnnnnnnnnnnnnnnnnnnnnnnnnnnnnnnnnnnnnnnnnnnnnnnnnnnnnnnnnnnnnnnnnnnnnnnnnnnnnnnnnnnnnnnnnnnnnnnnnnnnnnnnnnnnnnnnnnnnnnnnnnnnnnnnnnnnnnnnnnnnnnnnnnnnnnnnnnnnnnnnnnnnnnnnnnnnnnnnnnnnnnnnnnnnnnnnnnnnnnnnnnnnnnnnnnnnnnnnnnnnnnnnnnnnnnnnnnnnnnnnnnnnnnnnnnnnnnnnnnnnnnnnnnnnnnnnnnnnnnnnnnnnnnnnnnnnnnnnnnnnnnnnnnnnnnnnnnnnnnnnnnnnnnnnnnnnnnnnnnnnnnnnnnnnnnnnnnnnnnnnnnnnnnnnnnnnnnnnnnnnnnnnnnnnnnnnnnnnnnnnnnnnnnnnnnnnnnnnnnnnnnnnnnnnnnnnnnnnnnnnnnnnnnnnnnnnnnnnnnnnnnnnnnnnnnnnnnnnnnnnnnnnnnnnnnnnnnnnnnnnnnnnnnnnnnnnnnnnnnnnnnnnnnnnnnnnnnnnnnnnnnnnnnnnnnnnnnnnnnnnnnnnnnnnnnnnnnnnnnnnnnnnnnnnnnnnnnnnnnnnnnnnnnnnnnnnnnnnnnnnnnnnnnnnnnnnnnnnnnnnnnnnnnnnnnnnnnnnnnnnnnnnnnnnnnnnnnnnnnnnnnnnnnnnnnnnnnnnnnnnnnnnnnnnnnnnnnnnnnnnnnnnnnnnnnnnnnnnnnnnnnnnnnnnnnnnnnnnnnnnnnnnnnnnnnnnnnnnnnnnnnnnnnnnnnnnnnnnnnnnnnnnnnnnnnnnnnnnnnnnnnnnnnnnnnnnnnnnnnnnnnnnnnnnnnnnnnnnnnnnnnnnnnnnnnnnnnnnnnnnnnnnnnnnnnnnnnnnnnnnnnnnnnnnnnnnnnnnnnnnnnnnnnnnnnnnnnnnnnnnnnnnnnnnnnnnnnnnnnnnnnnnnnnnnnnnnnnnnnnnnnnnnnnnnnnnnnnnnnnnnnnnnnnnnnnnnnnnnnnnnnnnnnnnnnnnnnnnnnnnnnnnnnnnnnnnnnnnnnnnnnnnnnnnnnnnnnnnnnnnnnnnnnnnnnnnnnnnnnnnnnnnnnnnnnnnnnnnnnnnnnnnnnnnnnnnnnnnnnnnnnnnnnnnnnnnnnnnnnnnnnnnnnnnnnnnnnnnnnnnnnnnnnnnnnnnnnnnnnnnnnnnnnnnnnnnnnnnnnnnnnnnnnnnnnnnnnnnnnnnnnnnnnnnnnnnnnnnnnnnnnnnnnnnnnnnnnnnnnnnnnnnnnnnnnnnnnnnnnnnnnnnnnnnnnnnnnnnnnnnnnnnnnnnnnnnnnnnnnnnnnnnnnnnnnnnnnnnnnnnnnnnnnnnnnnnnnnnnnnnnnnnnnnnnnnnnnnnnnnnnnnnnnnnnnnnnnnnnnnnnnnnnnnnnnnnnnnnnnnnnnnnnnnnnnnnnnnnnnnnnnnnnnnnnnnnnnnnnnnnnnnnnnnnnnnnnnnnnnnnnnnnnnnnnnnnnnnnnnnnnnnnnnnnnnnnnnnnnnnnnnnnnnnnnnnnnnnnnnnnnnnnnnnnnnnnnnnnnnnnnnnnnnnnnnnnnnnnnnnnnnnnnnnnnnnnnnnnnnnnnnnnnnnnnnnnnnnnnnnnnnnnnnnnnnnnnnnnnnnnnnnnnnnnnnnnnnnnnnnnnnnnnnnnnnnnnnnnnnnnnnnnnnnnnnnnnnnnnnnnnnnnnnnnnnnnnnnnnnnnnnnnnnnnnnnnnnnnnnnnnnnnnnnnnnnnnnnnnnnnnnnnnnnnnnnnnnnnnnnnnnnnnnnnnnnnnnnnnnnnnnnnnnnnnnnnnnnnnnnnnnnnnnnnnnnnnnnnnnnnnnnnnnnnnnnnnnnnnnnnnnnnnnnnnnnnnnnnnnnnnnnnnnnnnnnnnnnnnnnnnnnnnnnnnnnnnnnnnnnnnnnnnnnnnnnnnnnnnnnnnnnnnnnnnnnnnnnnnnnnnnnnnnnnnnnnnnnnnnnnnnnnnnnnnnnnnnnnnnnnnnnnnnnnnnnnnnnnnnnnnnnnnnnnnnnnnnnnnnnnnnnnnnnnnnnnnnnnnnnnnnnnnnnnnnnnnnnnnnnnnnnnnnnnnnnnnnnnnnnnnnnnnnnnnnnnnnnnnnnnnnnnnnnnnnnnnnnnnnnnnnnnnnnnnnnnnnnnnnnnnnnnnnnnnnnnnnnnnnnnnnnnnnnnnnnnnnnnnnnnnnnnnnnnnnnnnnnnnnnnnnnnnnnnnnnnnnnnnnnnnnnnnnnnnnnnnnnnnnnnnnnnnnnnnnnnnnnnnnnnnnnnnnnnnnnnnnnnnnnnnnnnnnnnnnnnnnnnnnnnnnnnnnnnnnnnnnnnnnnnnnnnnnnnnnnnnnnnnnnnnnnnnnnnnnnnnnnnnnnnnnnnnnnnnnnnnnnnnnnnnnnnnnnnnnnnnnnnnnnnnnnnnnnnnnnnnnnnnnnnnnnnnnnnnnnnnnnnnnnnnnnnnnnnnnnnnnnnnnnnnnnnnnnnnnnnnnnnnnnnnnnnnnnnnnnnnnnnnnnnnnnnnnnnnnnnnnnnnnnnnnnnnnnnnnnnnnnnnnnnnnnnnnnnnnnnnnnnnnnnnnnnnnnnnnnnnnnnnnnnnnnnnnnnnnnnnnnnnnnnnnnnnnnnnnnnnnnnnnnnnnnnnnnnnnnnnnnnnnnnnnnnnnnnnnnnnnnnnnnnnnnnnnnnnnnnnnnnnnnnnnnnnnnnnnnnnnnnnnnnnnnnnnnnnnnnnnnnnnnnnnnnnnnnnnnnnnnnnnnnnnnnnnnnnnnnnnnnnnnnnnnnnnnnnnnnnnnnnnnnnnnnnnnnnnnnnnnnnnnnnnnnnnnnnnnnnnnnnnnnnnnnnnnnnnnnnnnnnnnnnnnnnnnnnnnnnnnnnnnnnnnnnnnnnnnnnnnnnnnnnnnnnnnnnnnnnnnnnnnnnnnnnnnnnnnnnnnnnnnnnnnnnnnnnnnnnnnnnnnnnnnnnnnnnnnnnnnnnnnnnnnnnnnnnnnnnnnnnnnnnnnnnnnnnnnnnnnnnnnnnnnnnnnnnnnnnnnnnnnnnnnnnnnnnnnnnnnnnnnnnnnnnnnnnnnnnnnnnnnnnnnnnnnnnnnnnnnnnnnnnnnnnnnnnnnnnnnnnnnnnnnnnnnnnnnnnnnnnnnnnnnnnnnnnnnnnnnnnnnnnnnnnnnnnnnnnnnnnnnnnnnnnnnnnnnnnnnnnnnnnnnnnnnnnnnnnnnnnnnnnnnnnnnnnnnnnnnnnnnnnnnnnnnnnnnnnnnnnnnnnnnnnnnnnnnnnnnnnnnnnnnnnnnnnnnnnnnnnnnnnnnnnnnnnnnnnnnnnnnnnnnnnnnnnnnnnnnnnnnnnnnnnnnnnnnnnnnnnnnnnnnnnnnnnnnnnnnnnnnnnnnnnnnnnnnnnnnnnnnnnnnnnnnnnnnnnnnnnnnnnnnnnnnnnnnnnnnnnnnnnnnnnnnnnnnnnnnnnnnnnnnnnnnnnnnnnnnnnnnnnnnnnnnnnnnnnnnnnnnnnnnnnnnnnnnnnnnnnnnnnnnnnnnnnnnnnnnnnnnnnnnnnnnnnnnnnnnnnnnnnnnnnnnnnnnnnnnnnnnnnnnnnnnnnnnnnnnnnnnnnnnnnnnnnnnnnnnnnnnnnnnnnnnnnnnnnnnnnnnnnnnnnnnnnnnnnnnnnnnnnnnnnnnnnnnnnnnnnnnnnnnnnnnnnnnnnnnnnnnnnnnnnnnnnnnnnnnnnnnnnnnnnnnnnnnnnnnnnnnnnnnnnnnnnnnnnnnnnnnnnnnnnnnnnnnnnnnnnnnnnnnnnnnnnnnnnnnnnnnnnnnnnnnnnnnnnnnnnnnnnnnnnnnnnnnnnnnnnnnnnnnnnnnnnnnnnnnnnnnnnnnnnnnnnnnnnnnnnnnnnnnnnnnnnnnnnnnnnnnnnnnnnnnnnnnnnnnnnnnnnnnnnnnnnnnnnnnnnnnnnnnnnnnnnnnnnnnnnnnnnnnnnnnnnnnnnnnnnnnnnnnnnnnnnnnnnnnnnnnnnnnnnnnnnnnnnnnnnnnnnnnnnnnnnnnnnnnnnnnnnnnnnnnnnnnnnnnnnnnnnnnnnnnnnnnnnnnnnnnnnnnnnnnnnnnnnnnnnnnnnnnnnnnnnnnnnnnnnnnnnnnnnnnnnnnnnnnnnnnnnnnnnnnnnnnnnnnnnnnnnnnnnnnnnnnnnnnnnnnnnnnnnnnnnnnnnnnnnnnnnnnnnnnnnnnnnnnnnnnnnnnnnnnnnnnnnnnnnnnnnnnnnnnnnnnnnnnnnnnnnnnnnnnnnnnnnnnnnnnnnnnnnnnnnnnnnnnnnnnnnnnnnnnnnnnnnnnnnnnnnnnnnnnnnnnnnnnnnnnnnnnnnnnnnnnnnnnnnnnnnnnnnnnnnnnnnnnnnnnnnnnnnnnnnnnnnnnnnnnnnnnnnnnnnnnnnnnnnnnnnnnnnnnnnnnnnnnnnnnnnnnnnnnnnnnnnnnnnnnnnnnnnnnnnnnnnnnnnnnnnnnnnnnnnnnnnnnnnnnnnnnnnnnnnnnnnnnnnnnnnnnnnnnnnnnnnnnnnnnnnnnnnnnnnnnnnnnnnnnnnnnnnnnnnnnnnnnnnnnnnnnnnnnnnnnnnnnnnnnnnnnnnnnnnnnnnnnnnnnnnnnnnnnnnnnnnnnnnnnnnnnnnnnnnnnnnnnnnnnnnnnnnnnnnnnnnnnnnnnnnnnnnnnnnnnnnnnnnnnnnnnnnnnnnnnnnnnnnnnnnnnnnnnnnnnnnnnnnnnnnnnnnnnnnnnnnnnnnnnnnnnnnnnnnnnnnnnnnnnnnnnnnnnnnnnnnnnnnnnnnnnnnnnnnnnnnnnnnnnnnnnnnnnnnnnnnnnnnnnnnnnnnnnnnnnnnnnnnnnnnnnnnnnnnnnnnnnnnnnnnnnnnnnnnnnnnnnnnnnnnnnnnnnnnnnnnnnnnnnnnnnnnnnnnnnnnnnnnnnnnnnnnnnnnnnnnnnnnnnnnnnnnnnnnnnnnnnnnnnnnnnnnnnnnnnnnnnnnnnnnnnnnnnnnnnnnnnnnnnnnnnnnnnnnnnnnnnnnnnnnnnnnnnnnnnnnnnnnnnnnnnnnnnnnnnnnnnnnnnnnnnnnnnnnnnnnnnnnnnnnnnnnnnnnnnnnnnnnnnnnnnnnnnnnnnnnnnnnnnnnnnnnnnnnnnnnnnnnnnnnnnnnnnnnnnnnnnnnnnnnnnnnnnnnnnnnnnnnnnnnnnnnnnnnnnnnnnnnnnnnnnnnnnnnnnnnnnnnnnnnnnnnnnnnnnnnnnnnnnnnnnnnnnnnnnnnnnnnnnnnnnnnnnnnnnnnnnnnnnnnnnnnnnnnnnnnnnnnnnnnnnnnnnnnnnnnnnnnnnnnnnnnnnnnnnnnnnnnnnnnnnnnnnnnnnnnnnnnnnnnnnnnnnnnnnnnnnnnnnnnnnnnnnnnnnnnnnnnnnnnnnnnnnnnnnnnnnnnnnnnnnnnnnnnnnnnnnnnnnnnnnnnnnnnnnnnnnnnnnnnnnnnnnnnnnnnnnnnnnnnnnnnnnnnnnnnnnnnnnnnnnnnnnnnnnnnnnnnnnnnnnnnnnnnnnnnnnnnnnnnnnnnnnnnnnnnnnnnnnnnnnnnnnnnnnnnnnnnnnnnnnnnnnnnnnnnnnnnnnnnnnnnnnnnnnnnnnnnnnnnnnnnnnnnnnnnnnnnnnnnnnnnnnnnnnnnnnnnnnnnnnnnnnnnnnnnnnnnnnnnnnnnnnnnnnnnnnnnnnnnnnnnnnnnnnnnnnnnnnnnnnnnnnnnnnnnnnnnnnnnnnnnnnnnnnnnnnnnnnnnnnnnnnnnnnnnnnnnnnnnnnnnnnnnnnnnnnnnnnnnnnnnnnnnnnnnnnnnnnnnnnnnnnnnnnnnnnnnnnnnnnnnnnnnnnnnnnnnnnnnnnnnnnnnnnnnnnnnnnnnnnnnnnnnnnnnnnnnnnnnnnnnnnnnnnnnnnnnnnnnnnnnnnnnnnnnnnnnnnnnnnnnnnnnnnnnnnnnnnnnnnnnnnnnnnnnnnnnnnnnnnnnnnnnnnnnnnnnnnnnnnnnnnnnnnnnnnnnnnnnnnnnnnnnnnnnnnnnnnnnnnnnnnnnnnnnnnnnnnnnnnnnnnnnnnnnnnnnnnnnnnnnnnnnnnnnnnnnnnnnnnnnnnnnnnnnnnnnnnnnnnnnnnnnnnnnnnnnnnnnnnnnnnnnnnnnnnnnnnnnnnnnnnnnnnnnnnnnnnnnnnnnnnnnnnnnnnnnnnnnnnnnnnnnnnnnnnnnnnnnnnnnnnnnnnnnnnnnnnnnnnnnnnnnnnnnnnnnnnnnnnnnnnnnnnnnnnnnnnnnnnnnnnnnnnnnnnnnnnnnnnnnnnnnnnnnnnnnnnnnnnnnnnnnnnnnnnnnnnnnnnnnnnnnnnnnnnnnnnnnnnnnnnnnnnnnnnnnnnnnnnnnnnnnnnnnnnnnnnnnnnnnnnnnnnnnnnnnnnnnnnnnnnnnnnnnnnnnnnnnnnnnnnnnnnnnnnnnnnnnnnnnnnnnnnnnnnnnnnnnnnnnnnnnnnnnnnnnnnnnnnnnnnnnnnnnnnnnnnnnnnnnnnnnnnnnnnnnnnnnnnnnnnnnnnnnnnnnnnnnnnnnnnnnnnnnnnnnnnnnnnnnnnnnnnnnnnnnnnnnnnnnnnnnnnnnnnnnnnnnnnnnnnnnnnnnnnnnnnnnnnnnnnnnnnnnnnnnnnnnnnnnnnnnnnnnnnnnnnnnnnnnnnnnnnnnnnnnnnnnnnnnnnnnnnnnnnnnnnnnnnnnnnnnnnnnnnnnnnnnnnnnnnnnnnnnnnnnnnnnnnnnnnnnnnnnnnnnnnnnnnnnnnnnnnnnnnnnnnnnnnnnnnnnnnnnnnnnnnnnnnnnnnnnnnnnnnnnnnnnnnnnnnnnnnnnnnnnnnnnnnnnnnnnnnnnnnnnnnnnnnnnnnnnnnnnnnnnnnnnnnnnnnnnnnnnnnnnnnnnnnnnnnnnnnnnnnnnnnnnnnnnnnnnnnnnnnnnnnnnnnnnnnnnnnnnnnnnnnnnnnnnnnnnnnnnnnnnnnnnnnnnnnnnnnnnnnnnnnnnnnnnnnnnnnnnnnnnnnnnnnnnnnnnnnnnnnnnnnnnnnnnnnnnnnnnnnnnnnnnnnnnnnnnnnnnnnnnnnnnnnnnnnnnnnnnnnnnnnnnnnnnnnnnnnnnnnnnnnnnnnnnnnnnnnnnnnnnnnnnnnnnnnnnnnnnnnnnnnnnnnnnnnnnnnnnnnnnnnnnnnnnnnnnnnnnnnnnnnnnnnnnnnnnnnnnnnnnnnnnnnnnnnnnnnnnnnnnnnnnnnnnnnnnnnnnnnnnnnnnnnnnnnnnnnnnnnnnnnnnnnnnnnnnnnnnnnnnnnnnnnnnnnnnnnnnnnnnnnnnnnnnnnnnnnnnnnnnnnnnnnnnnnnnnnnnnnnnnnnnnnnnnnnnnnnnnnnnnnnnnnnnnnnnnnnnnnnnnnnnnnnnnnnnnnnnnnnnnnnnnnnnnnnnnnnnnnnnnnnnnnnnnnnnnnnnnnnnnnnnnnnnnnnnnnnnnnnnnnnnnnnnnnnnnnnnnnnnnnnnnnnnnnnnnnnnnnnnnnnnnnnnnnnnnnnnnnnnnnnnnnnnnnnnnnnnnnnnnnnnnnnnnnnnnnnnnnnnnnnnnnnnnnnnnnnnnnnnnnnnnnnnnnnnnnnnnnnnnnnnnnnnnnnnnnnnnnnnnnnnnnnnnnnnnnnnnnnnnnnnnnnnnnnnnnnnnnnnnnnnnnnnnnnnnnnnnnnnnnnnnnnnnnnnnnnnnnnnnnnnnnnnnnnnnnnnnnnnnnnnnnnnnnnnnnnnnnnnnnnnnnnnnnnnnnnnnnnnnnnnnnnnnnnnnnnnnnnnnnnnnnnnnnnnnnnnnnnnnnnnnnnnnnnnnnnnnnnnnnnnnnnnnnnnnnnnnnnnnnnnnnnnnnnnnnnnnnnnnnnnnnnnnnnnnnnnnnnnnnnnnnnnnnnnnnnnnnnnnnnnnnnnnnnnnnnnnnnnnnnnnnnnnnnnnnnnnnnnnnnnnnnnnnnnnnnnnnnnnnnnnnnnnnnnnnnnnnnnnnnnnnnnnnnnnnnnnnnnnnnnnnnnnnnnnnnnnnnnnnnnnnnnnnnnnnnnnnnnnnnnnnnnnnnnnnnnnnnnnnnnnnnnnnnnnnnnnnnnnnnnnnnnnnnnnnnnnnnnnnnnnnnnnnnnnnnnnnnnnnnnnnnnnnnnnnnnnnnnnnnnnnnnnnnnnnnnnnnnnnnnnnnnnnnnnnnnnnnnnnnnnnnnnnnnnnnnnnnnnnnnnnnnnnnnnnnnnnnnnnnnnnnnnnnnnnnnnnnnnnnnnnnnnnnnnnnnnnnnnnnnnnnnnnnnnnnnnnnnnnnnnnnnnnnnnnnnnnnnnnnnnnnnnnnnnnnnnnnnnnnnnnnnnnnnnnnnnnnnnnnnnnnnnnnnnnnnnnnnnnnnnnnnnnnnnnnnnnnnnnnnnnnnnnnnnnnnnnnnnnnnnnnnnnnnnnnnnnnnnnnnnnnnnnnnnnnnnnnnnnnnnnnnnnnnnnnnnnnnnnnnnnnnnnnnnnnnnnnnnnnnnnnnnnnnnnnnnnnnnnnnnnnnnnnnnnnnnnnnnnnnnnnnnnnnnnnnnnnnnnnnnnnnnnnnnnnnnnnnnnnnnnnnnnnnnnnnnnnnnnnnnnnnnnnnnnnnnnnnnnnnnnnnnnnnnnnnnnnnnnnnnnnnnnnnnnnnnnnnnnnnnnnnnnnnnnnnnnnnnnnnnnnnnnnnnnnnnnnnnnnnnnnnnnnnnnnnnnnnnnnnnnnnnnnnnnnnnnnnnnnnnnnnnnnnnnnnnnnnnnnnnnnnnnnnnnnnnnnnnnnnnnnnnnnnnnnnnnnnnnnnnnnnnnnnnnnnnnnnnnnnnnnnnnnnnnnnnnnnnnnnnnnnnnnnnnnnnnnnnnnnnnnnnnnnnnnnnnnnnnnnnnnnnnnnnnnnnnnnnnnnnnnnnnnnnnnnnnnnnnnnnnnnnnnnnnnnnnnnnnnnnnnnnnnnnnnnnnnnnnnnnnnnnnnnnnnnnnnnnnnnnnnnnnnnnnnnnnnnnnnnnnnnnnnnnnnnnnnnnnnnnnnnnnnnnnnnnnnnnnnnnnnnnnnnnnnnnnnnnnnnnnnnnnnnnnnnnnnnnnnnnnnnnnnnnnnnnnnnnnnnnnnnnnnnnnnnnnnnnnnnnnnnnnnnnnnnnnnnnnnnnnnnnnnnnnnnnnnnnnnnnnnnnnnnnnnnnnnnnnnnnnnnnnnnnnnnnnnnnnnnnnnnnnnnnnnnnnnnnnnnnnnnnnnnnnnnnnnnnnnnnnnnnnnnnnnnnnnnnnnnnnnnnnnnnnnnnnnnnnnnnnnnnnnnnnnnnnnnnnnnnnnnnnnnnnnnnnnnnnnnnnnnnnnnnnnnnnnnnnnnnnnnnnnnnnnnnnnnnnnnnnnnnnnnnnnnnnnnnnnnnnnnnnnnnnnnnnnnnnnnnnnnnnnnnnnnnnnnnnnnnnnnnnnnnnnnnnnnnnnnnnnnnnnnnnnnnnnnnnnnnnnnnnnnnnnnnnnnnnnnnnnnnnnnnnnnnnnnnnnnnnnnnnnnnnnnnnnnnnnnnnnnnnnnnnnnnnnnnnnnnnnnnnnnnnnnnnnnnnnnnnnnnnnnnnnnnnnnnnnnnnnnnnnnnnnnnnnnnnnnnnnnnnnnnnnnnnnnnnnnnnnnnnnnnnnnnnnnnnnnnnnnnnnnnnnnnnnnnnnnnnnnnnnnnnnnnnnnnnnnnnnnnnnnnnnnnnnnnnnnnnnnnnnnnnnnnnnnnnnnnnnnnnnnnnnnnnnnnnnnnnnnnnnnnnnnnnnnnnnnnnnnnnnnnnnnnnnnnnnnnnnnnnnnnnnnnnnnnnnnnnnnnnnnnnnnnnnnnnnnnnnnnnnnnnnnnnnnnnnnnnnnnnnnnnnnnnnnnnnnnnnnnnnnnnnnnnnnnnnnnnnnnnnnnnnnnnnnnnnnnnnnnnnnnnnnnnnnnnnnnnnnnnnnnnnnnnnnnnnnnnnnnnnnnnnnnnnnnnnnnnnnnnnnnnnnnnnnnnnnnnnnnnnnnnnnnnnnnnnnnnnnnnnnnnnnnnnnnnnnnnnnnnnnnnnnnnnnnnnnnnnnnnnnnnnnnnnnnnnnnnnnnnnnnnnnnnnnnnnnnnnnnnnnnnnnnnnnnnnnnnnnnnnnnnnnnnnnnnnnnnnnnnnnnnnnnnnnnnnnnnnnnnnnnnnnnnnnnnnnnnnnnnnnnnnnnnnnnnnnnnnnnnnnnnnnnnnnnnnnnnnnnnnnnnnnnnnnnnnnnnnnnnnnnnnnnnnnnnnnnnnnnnnnnnnnnnnnnnnnnnnnnnnnnnnnnnnnnnnnnnnnnnnnnnnnnnnnnnnnnnnnnnnnnnnnnnnnnnnnnnnnnnnnnnnnnnnnnnnnnnnnnnnnnnnnnnnnnnnnnnnnnnnnnnnnnnnnnnnnnnnnnnnnnnnnnnnnnnnnnnnnnnnnnnnnnnnnnnnnnnnnnnnnnnnnnnnnnnnnnnnnnnnnnnnnnnnnnnnnnnnnnnnnnnnnnnnnnnnnnnnnnnnnnnnnnnnnnnnnnnnnnnnnnnnnnnnnnnnnnnnnnnnnnnnnnnnnnnnnnnnnnnnnnnnnnnnnnnnnnnnnnnnnnnnnnnnnnnnnnnnnnnnnnnnnnnnnnnnnnnnnnnnnnnnnnnnnnnnnnnnnnnnnnnnnnnnnnnnnnnnnnnnnnnnnnnnnnnnnnnnnnnnnnnnnnnnnnnnnnnnnnnnnnnnnnnnnnnnnnnnnnnnnnnnnnnnnnnnnnnnnnnnnnnnnnnnnnnnnnnnnnnnnnnnnnnnnnnnnnnnnnnnnnnnnnnnnnnnnnnnnnnnnnnnnnnnnnnnnnnnnnnnnnnnnnnnnnnnnnnnnnnnnnnnnnnnnnnnnnnnnnnnnnnnnnnnnnnnnnnnnnnnnnnnnnnnnnnnnnnnnnnnnnnnnnnnnnnnnnnnnnnnnnnnnnnnnnnnnnnnnnnnnnnnnnnnnnnnnnnnnnnnnnnnnnnnnnnnnnnnnnnnnnnnnnnnnnnnnnnnnnnnnnnnnnnnnnnnnnnnnnnnnnnnnnnnnnnnnnnnnnnnnnnnnnnnnnnnnnnnnnnnnnnnnnnnnnnnnnnnnnnnnnnnnnnnnnnnnnnnnnnnnnnnnnnnnnnnnnnnnnnnnnnnnnnnnnnnnnnnnnnnnnnnnnnnnnnnnnnnnnnnnnnnnnnnnnnnnnnnnnnnnnnnnnnnnnnnnnnnnnnnnnnnnnnnnnnnnnnnnnnnnnnnnnnnnnnnnnnnnnnnnnnnnnnnnnnnnnnnnnnnnnnnnnnnnnnnnnnnnnnnnnnnnnnnnnnnnnnnnnnnnnnnnnnnnnnnnnnnnnnnnnnnnnnnnnnnnnnnnnnnnnnnnnnnnnnnnnnnnnnnnnnnnnnnnnnnnnnnnnnnnnnnnnnnnnnnnnnnnnnnnnnnnnnnnnnnnnnnnnnnnnnnnnnnnnnnnnnnnnnnnnnnnnnnnnnnnnnnnnnnnnnnnnnnnnnnnnnnnnnnnnnnnnnnnnnnnnnnnnnnnnnnnnnnnnnnnnnnnnnnnnnnnnnnnnnnnnnnnnnnnnnnnnnnnnnnnnnnnnnnnnnnnnnnnnnnnnnnnnnnnnnnnnnnnnnnnnnnnnnnnnnnnnnnnnnnnnnnnnnnnnnnnnnnnnnnnnnnnnnnnnnnnnnnnnnnnnnnnnnnnnnnnnnnnnnnnnnnnnnnnnnnnnnnnnnnnnnnnnnnnnnnnnnnnnnnnnnnnnnnnnnnnnnnnnnnnnnnnnnnnnnnnnnnnnnnnnnnnnnnnnnnnnnnnnnnnnnnnnnnnnnnnnnnnnnnnnnnnnnnnnnnnnnnnnnnnnnnnnnnnnnnnnnnnnnnnnnnnnnnnnnnnnnnnnnnnnnnnnnnnnnnnnnnnnnnnnnnnnnnnnnnnnnnnnnnnnnnnnnnnnnnnnnnnnnnnnnnnnnnnnnnnnnnnnnnnnnnnnnnnnnnnnnnnnnnnnnnnnnnnnnnnnnnnnnnnnnnnnnnnnnnnnnnnnnnnnnnnnnnnnnnnnnnnnnnnnnnnnnnnnnnnnnnnnnnnnnnnnnnnnnnnnnnnnnnnnnnnnnnnnnnnnnnnnnnnnnnnnnnnnnnnnnnnnnnnnnnnnnnnnnnnnnnnnnnnnnnnnnnnnnnnnnnnnnnnnnnnnnnnnnnnnnnnnnnnnnnnnnnnnnnnnnnnnnnnnnnnnnnnnnnnnnnnnnnnnnnnnnnnnnnnnnnnnnnnnnnnnnnnnnnnnnnnnnnnnnnnnnnnnnnnnnnnnnnnnnnnnnnnnnnnnnnnnnnnnnnnnnnnnnnnnnnnnnnnnnnnnnnnnnnnnnnnnnnnnnnnnnnnnnnnnnnnnnnnnnnnnnnnnnnnnnnnnnnnnnnnnnnnnnnnnnnnnnnnnnnnnnnnnnnnnnnnnnnnnnnnnnnnnnnnnnnnnnnnnnnnnnnnnnnnnnnnnnnnnnnnnnnnnnnnnnnnnnnnnnnnnnnnnnnnnnnnnnnnnnnnnnnnnnnnnnnnnnnnnnnnnnnnnnnnnnnnnnnnnnnnnnnnnnnnnnnnnnnnnnnnnnnnnnnnnnnnnnnnnnnnnnnnnnnnnnnnnnnnnnnnnnnnnnnnnnnnnnnnnnnnnnnnnnnnnnnnnnnnnnnnnnnnnnnnnnnnnnnnnnnnnnnnnnnnnnnnnnnnnnnnnnnnnnnnnnnnnnnnnnnnnnnnnnnnnnnnnnnnnnnnnnnnnnnnnnnnnnnnnnnnnnnnnnnnnnnnnnnnnnnnnnnnnnnnnnnnnnnnnnnnnnnnnnnnnnnnnnnnnnnnnnnnnnnnnnnnnnnnnnnnnnnnnnnnnnnnnnnnnnnnnnnnnnnnnnnnnnnnnnnnnnnnnnnnnnnnnnnnnnnnnnnnnnnnnnnnnnnnnnnnnnnnnnnnnnnnnnnnnnnnnnnnnnnnnnnnnnnnnnnnnnnnnnnnnnnnnnnnnnnnnnnnnnnnnnnnnnnnnnnnnnnnnnnnnnnnnnnnnnnnnnnnnnnnnnnnnnnnnnnnnnnnnnnnnnnnnnnnnnnnnnnnnnnnnnnnnnnnnnnnnnnnnnnnnnnnnnnnnnnnnnnnnnnnnnnnnnnnnnnnnnnnnnnnnnnnnnnnnnnnnnnnnnnnnnnnnnnnnnnnnnnnnnnnnnnnnnnnnnnnnnnnnnnnnnnnnnnnnnnnnnnnnnnnnnnnnnnnnnnnnnnnnnnnnnnnnnnnnnnnnnnnnnnnnnnnnnnnnnnnnnnnnnnnnnnnnnnnnnnnnnnnnnnnnnnnnnnnnnnnnnnnnnnnnnnnnnnnnnnnnnnnnnnnnnnnnnnnnnnnnnnnnnnnnnnnnnnnnnnnnnnnnnnnnnnnnnnnnnnnnnnnnnnnnnnnnnnnnnnnnnnnnnnnnnnnnnnnnnnnnnnnnnnnnnnnnnnnnnnnnnnnnnnnnnnnnnnnnnnnnnnnnnnnnnnnnnnnnnnnnnnnnnnnnnnnnnnnnnnnnnnnnnnnnnnnnnnnnnnnnnnnnnnnnnnnnnnnnnnnnnnnnnnnnnnnnnnnnnnnnnnnnnnnnnnnnnnnnnnnnnnnnnnnnnnnnnnnnnnnnnnnnnnnnnnnnnnnnnnnnnnnnnnnnnnnnnnnnnnnnnnnnnnnnnnnnnnnnnnnnnnnnnnnnnnnnnnnnnnnnnnnnnnnnnnnnnnnnnnnnnnnnnnnnnnnnnnnnnnnnnnnnnnnnnnnnnnnnnnnnnnnnnnnnnnnnnnnnnnnnnnnnnnnnnnnnnnnnnnnnnnnnnnnnnnnnnnnnnnnnnnnnnnnnnnnnnnnnnnnnnnnnnnnnnnnnnnnnnnnnnnnnnnnnnnnnnnnnnnnnnnnnnnnnnnnnnnnnnnnnnnnnnnnnnnnnnnnnnnnnnnnnnnnnnnnnnnnnnnnnnnnnnnnnnnnnnnnnnnnnnnnnnnnnnnnnnnnnnnnnnnnnnnnnnnnnnnnnnnnnnnnnnnnnnnnnnnnnnnnnnnnnnnnnnnnnnnnnnnnnnnnnnnnnnnnnnnnnnnnnnnnnnnnnnnnnnnnnnnnnnnnnnnnnnnnnnnnnnnnnnnnnnnnnnnnnnnnnnnnnnnnnnnnnnnnnnnnnnnnnnnnnnnnnnnnnnnnnnnnnnnnnnnnnnnnnnnnnnnnnnnnnnnnnnnnnnnnnnnnnnnnnnnnnnnnnnnnnnnnnnnnnnnnnnnnnnnnnnnnnnnnnnnnnnnnnnnnnnnnnnnnnnnnnnnnnnnnnnnnnnnnnnnnnnnnnnnnnnnnnnnnnnnnnnnnnnnnnnnnnnnnnnnnnnnnnnnnnnnnnnnnnnnnnnnnnnnnnnnnnnnnnnnnnnnnnnnnnnnnnnnnnnnnnnnnnnnnnnnnnnnnnnnnnnnnnnnnnnnnnnnnnnnnnnnnnnnnnnnnnnnnnnnnnnnnnnnnnnnnnnnnnnnnnnnnnnnnnnnnnnnnnnnnnnnnnnnnnnnnnnnnnnnnnnnnnnnnnnnnnnnnnnnnnnnnnnnnnnnnnnnnnnnnnnnnnnnnnnnnnnnnnnnnnnnnnnnnnnnnnnnnnnnnnnnnnnnnnnnnnnnnnnnnnnnnnnnnnnnnnnnnnnnnnnnnnnnnnnnnnnnnnnnnnnnnnnnnnnnnnnnnnnnnnnnnnnnnnnnnnnnnnnnnnnnnnnnnnnnnnnnnnnnnnnnnnnnnnnnnnnnnnnnnnnnnnnnnnnnnnnnnnnnnnnnnnnnnnnnnnnnnnnnnnnnnnnnnnnnnnnnnnnnnnnnnnnnnnnnnnnnnnnnnnnnnnnnnnnnnnnnnnnnnnnnnnnnnnnnnnnnnnnnnnnnnnnnnnnnnnnnnnnnnnnnnnnnnnnnnnnnnnnnnnnnnnnnnnnnnnnnnnnnnnnnnnnnnnnnnnnnnnnnnnnnnnnnnnnnnnnnnnnnnnnnnnnnnnnnnnnnnnnnnnnnnnnnnnnnnnnnnnnnnnnnnnnnnnnnnnnnnnnnnnnnnnnnnnnnnnnnnnnnnnnnnnnnnnnnnnnnnnnnnnnnnnnnnnnnnnnnnnnnnnnnnnnnnnnnnnnnnnnnnnnnnnnnnnnnnnnnnnnnnnnnnnnnnnnnnnnnnnnnnnnnnnnnnnnnnnnnnnnnnnnnnnnnnnnnnnnnnnnnnnnnnnnnnnnnnnnnnnnnnnnnnnnnnnnnnnnnnnnnnnnnnnnnnnnnnnnnnnnnnnnnnnnnnnnnnnnnnnnnnnnnnnnnnnnnnnnnnnnnnnnnnnnnnnnnnnnnnnnnnnnnnnnnnnnnnnnnnnnnnnnnnnnnnnnnnnnnnnnnnnnnnnnnnnnnnnnnnnnnnnnnnnnnnnnnnnnnnnnnnnnnnnnnnnnnnnnnnnnnnnnnnnnnnnnnnnnnnnnnnnnnnnnnnnnnnnnnnnnnnnnnnnnnnnnnnnnnnnnnnnnnnnnnnnnnnnnnnnnnnnnnnnnnnnnnnnnnnnnnnnnnnnnnnnnnnnnnnnnnnnnnnnnnnnnnnnnnnnnnnnnnnnnnnnnnnnnnnnnnnnnnnnnnnnnnnnnnnnnnnnnnnnnnnnnnnnnnnnnnnnnnnnnnnnnnnnnnnnnnnnnnnnnnnnnnnnnnnnnnnnnnnnnnnnnnnnnnnnnnnnnnnnnnnnnnnnnnnnnnnnnnnnnnnnnnnnnnnnnnnnnnnnnnnnnnnnnnnnnnnnnnnnnnnnnnnnnnnnnnnnnnnnnnnnnnnnnnnnnnnnnnnnnnnnnnnnnnnnnnnnnnnnnnnnnnnnnnnnnnnnnnnnnnnnnnnnnnnnnnnnnnnnnnnnnnnnnnnnnnnnnnnnnnnnnnnnnnnnnnnnnnnnnnnnnnnnnnnnnnnnnnnnnnnnnnnnnnnnnnnnnnnnnnnnnnnnnnnnnnnnnnnnnnnnnnnnnnnnnnnnnnnnnnnnnnnnnnnnnnnnnnnnnnnnnnnnnnnnnnnnnnnnnnnnnnnnnnnnnnnnnnnnnnnnnnnnnnnnnnnnnnnnnnnnnnnnnnnnnnnnnnnnnnnnnnnnnnnnnnnnnnnnnnnnnnnnnnnnnnnnnnnnnnnnnnnnnnnnnnnnnnnnnnnnnnnnnnnnnnnnnnnnnnnnnnnnnnnnnnnnnnnnnnnnnnnnnnnnnnnnnnnnnnnnnnnnnnnnnnnnnnnnnnnnnnnnnnnnnnnnnnnnnnnnnnnnnnnnnnnnnnnnnnnnnnnnnnnnnnnnnnnnnnnnnnnnnnnnnnnnnnnnnnnnnnnnnnnnnnnnnnnnnnnnnnnnnnnnnnnnnnnnnnnnnnnnnnnnnnnnnnnnnnnnnnnnnnnnnnnnnnnnnnnnnnnnnnnnnnnnnnnnnnnnnnnnnnnnnnnnnnnnnnnnnnnnnnnnnnnnnnnnnnnnnnnnnnnnnnnnnnnnnnnnnnnnnnnnnnnnnnnnnnnnnnnnnnnnnnnnnnnnnnnnnnnnnnnnnnnnnnnnnnnnnnnnnnnnnnnnnnnnnnnnnnnnnnnnnnnnnnnnnnnnnnnnnnnnnnnnnnnnnnnnnnnnnnnnnnnnnnnnnnnnnnnnnnnnnnnnnnnnnnnnnnnnnnnnnnnnnnnnnnnnnnnnnnnnnnnnnnnnnnnnnnnnnnnnnnnnnnnnnnnnnnnnnnnnnnnnnnnnnnnnnnnnnnnnnnnnnnnnnnnnnnnnnnnnnnnnnnnnnnnnnnnnnnnnnnnnnnnnnnnnnnnnnnnnnnnnnnnnnnnnnnnnnnnnnnnnnnnnnnnnnnnnnnnnnnnnnnnnnnnnnnnnnnnnnnnnnnnnnnnnnnnnnnnnnnnnnnnnnnnnnnnnnnnnnnnnnnnnnnnnnnnnnnnnnnnnnnnnnnnnnnnnnnnnnnnnnnnnnnnnnnnnnnnnnnnnnnnnnnnnnnnnnnnnnnnnnnnnnnnnnnnnnnnnnnnnnnnnnnnnnnnnnnnnnnnnnnnnnnnnnnnnnnnnnnnnnnnnnnnnnnnnnnnnnnnnnnnnnnnnnnnnnnnnnnnnnnnnnnnnnnnnnnnnnnnnnnnnnnnnnnnnnnnnnnnnnnnnnnnnnnnnnnnnnnnnnnnnnnnnnnnnnnnnnnnnnnnnnnnnnnnnnnnnnnnnnnnnnnnnnnnnnnnnnnnnnnnnnnnnnnnnnnnnnnnnnnnnnnnnnnnnnnnnnnnnnnnnnnnnnnnnnnnnnnnnnnnnnnnnnnnnnnnnnnnnnnnnnnnnnnnnnnnnnnnnnnnnnnnnnnnnnnnnnnnnnnnnnnnnnnnnnnnnnnnnnnnnnnnnnnnnnnnnnnnnnnnnnnnnnnnnnnnnnnnnnnnnnnnnnnnnnnnnnnnnnnnnnnnnnnnnnnnnnnnnnnnnnnnnnnnnnnnnnnnnnnnnnnnnnnnnnnnnnnnnnnnnnnnnnnnnnnnnnnnnnnnnnnnnnnnnnnnnnnnnnnnnnnnnnnnnnnnnnnnnnnnnnnnnnnnnnnnnnnnnnnnnnnnnnnnnnnnnnnnnnnnnnnnnnnnnnnnnnnnnnnnnnnnnnnnnnnnnnnnnnnnnnnnnnnnnnnnnnnnnnnnnnnnnnnnnnnnnnnnnnnnnnnnnnnnnnnnnnnnnnnnnnnnnnnnnnnnnnnnnnnnnnnnnnnnnnnnnnnnnnnnnnnnnnnnnnnnnnnnnnnnnnnnnnnnnnnnnnnnnnnnnnnnnnnnnnnnnnnnnnnnnnnnnnnnnnnnnnnnnnnnnnnnnnnnnnnnnnnnnnnnnnnnnnnnnnnnnnnnnnnnnnnnnnnnnnnnnnnnnnnnnnnnnnnnnnnnnnnnnnnnnnnnnnnnnnnnnnnnnnnnnnnnnnnnnnnnnnnnnnnnnnnnnnnnnnnnnnnnnnnnnnnnnnnnnnnnnnnnnnnnnnnnnnnnnnnnnnnnnnnnnnnnnnnnnnnnnnnnnnnnnnnnnnnnnnnnnnnnnnnnnnnnnnnnnnnnnnnnnnnnnnnnnnnnnnnnnnnnnnnnnnnnnnnnnnnnnnnnnnnnnnnnnnnnnnnnnnnnnnnnnnnnnnnnnnnnnnnnnnnnnnnnnnnnnnnnnnnnnnnnnnnnnnnnnnnnnnnnnnnnnnnnnnnnnnnnnnnnnnnnnnnnnnnnnnnnnnnnnnnnnnnnnnnnnnnnnnnnnnnnnnnnnnnnnnnnnnnnnnnnnnnnnnnnnnnnnnnnnnnnnnnnnnnnnnnnnnnnnnnnnnnnnnnnnnnnnnnnnnnnnnnnnnnnnnnnnnnnnnnnnnnnnnnnnnnnnnnnnnnnnnnnnnnnnnnnnnnnnnnnnnnnnnnnnnnnnnnnnnnnnnnnnnnnnnnnnnnnnnnnnnnnnnnnnnnnnnnnnnnnnnnnnnnnnnnnnnnnnnnnnnnnnnnnnnnnnnnnnnnnnnnnnnnnnnnnnnnnnnnnnnnnnnnnnnnnnnnnnnnnnnnnnnnnnnnnnnnnnnnnnnnnnnnnnnnnnnnnnnnnnnnnnnnnnnnnnnnnnnnnnnnnnnnnnnnnnnnnnnnnnnnnnnnnnnnnnnnnnnnnnnnnnnnnnnnnnnnnnnnnnnnnnnnnnnnnnnnnnnnnnnnnnnnnnnnnnnnnnnnnnnnnnnnnnnnnnnnnnnnnnnnnnnnnnnnnnnnnnnnnnnnnnnnnnnnnnnnnnnnnnnnnnnnnnnnnnnnnnnnnnnnnnnnnnnnnnnnnnnnnnnnnnnnnnnnnnnnnnnnnnnnnnnnnnnnnnnnnnnnnnnnnnnnnnnnnnnnnnnnnnnnnnnnnnnnnnnnnnnnnnnnnnnnnnnnnnnnnnnnnnnnnnnnnnnnnnnnnnnnnnnnnnnnnnnnnnnnnnnnnnnnnnnnnnnnnnnnnnnnnnnnnnnnnnnnnnnnnnnnnnnnnnnnnnnnnnnnnnnnnnnnnnnnnnnnnnnnnnnnnnnnnnnnnnnnnnnnnnnnnnnnnnnnnnnnnnnnnnnnnnnnnnnnnnnnnnnnnnnnnnnnnnnnnnnnnnnnnnnnnnnnnnnnnnnnnnnnnnnnnnnnnnnnnnnnnnnnnnnnnnnnnnnnnnnnnnnnnnnnnnnnnnnnnnnnnnnnnnnnnnnnnnnnnnnnnnnnnnnnnnnnnnnnnnnnnnnnnnnnnnnnnnnnnnnnnnnnnnnnnnnnnnnnnnnnnnnnnnnnnnnnnnnnnnnnnnnnnnnnnnnnnnnnnnnnnnnnnnnnnnnnnnnnnnnnnnnnnnnnnnnnnnnnnnnnnnnnnnnnnnnnnnnnnnnnnnnnnnnnnnnnnnnnnnnnnnnnnnnnnnnnnnnnnnnnnnnnnnnnnnnnnnnnnnnnnnnnnnnnnnnnnnnnnnnnnnnnnnnnnnnnnnnnnnnnnnnnnnnnnnnnnnnnnnnnnnnnnnnnnnnnnnnnnnnnnnnnnnnnnnnnnnnnnnnnnnnnnnnnnnnnnnnnnnnnnnnnnnnnnnnnnnnnnnnnnnnnnnnnnnnnnnnnnnnnnnnnnnnnnnnnnnnnnnnnnnnnnnnnnnnnnnnnnnnnnnnnnnnnnnnnnnnnnnnnnnnnnnnnnnnnnnnnnnnnnnnnnnnnnnnnnnnnnnnnnnnnnnnnnnnnnnnnnnnnnnnnnnnnnnnnnnnnnnnnnnnnnnnnnnnnnnnnnnnnnnnnnnnnnnnnnnnnnnnnnnnnnnnnnnnnnnnnnnnnnnnnnnnnnnnnnnnnnnnnnnnnnnnnnnnnnnnnnnnnnnnnnnnnnnnnnnnnnnnnnnnnnnnnnnnnnnnnnnnnnnnnnnnnnnnnnnnnnnnnnnnnnnnnnnnnnnnnnnnnnnnnnnnnnnnnnnnnnnnnnnnnnnnnnnnnnnnnnnnnnnnnnnnnnnnnnnnnnnnnnnnnnnnnnnnnnnnnnnnnnnnnnnnnnnnnnnnnnnnnnnnnnnnnnnnnnnnnnnnnnnnnnnnnnnnnnnnnnnnnnnnnnnnnnnnnnnnnnnnnnnnnnnnnnnnnnnnnnnnnnnnnnnnnnnnnnnnnnnnnnnnnnnnnnnnnnnnnnnnnnnnnnnnnnnnnnnnnnnnnnnnnnnnnnnnnnnnnnnnnnnnnnnnnnnnnnnnnnnnnnnnnnnnnnnnnnnnnnnnnnnnnnnnnnnnnnnnnnnnnnnnnnnnnnnnnnnnnnnnnnnnnnnnnnnnnnnnnnnnnnnnnnnnnnnnnnnnnnnnnnnnnnnnnnnnnnnnnnnnnnnnnnnnnnnnnnnnnnnnnnnnnnnnnnnnnnnnnnnnnnnnnnnnnnnnnnnnnnnnnnnnnnnnnnnnnnnnnnnnnnnnnnnnnnnnnnnnnnnnnnnnnnnnnnnnnnnnnnnnnnnnnnnnnnnnnnnnnnnnnnnnnnnnnnnnnnnnnnnnnnnnnnnnnnnnnnnnnnnnnnnnnnnnnnnnnnnnnnnnnnnnnnnnnnnnnnnnnnnnnnnnnnnnnnnnnnnnnnnnnnnnnnnnnnnnnnnnnnnnnnnnnnnnnnnnnnnnnnnnnnnnnnnnnnnnnnnnnnnnnnnnnnnnnnnnnnnnnnnnnnnnnnnnnnnnnnnnnnnnnnnnnnnnnnnnnnnnnnnnnnnnnnnnnnnnnnnnnnnnnnnnnnnnnnnnnnnnnnnnnnnnnnnnnnnnnnnnnnnnnnnnnnnnnnnnnnnnnnnnnnnnnnnnnnnnnnnnnnnnnnnnnnnnnnnnnnnnnnnnnnnnnnnnnnnnnnnnnnnnnnnnnnnnnnnnnnnnnnnnnnnnnnnnnnnnnnnnnnnnnnnnnnnnnnnnnnnnnnnnnnnnnnnnnnnnnnnnnnnnnnnnnnnnnnnnnnnnnnnnnnnnnnnnnnnnnnnnnnnnnnnnnnnnnnnnnnnnnnnnnnnnnnnnnnnnnnnnnnnnnnnnnnnnnnnnnnnnnnnnnnnnnnnnnnnnnnnnnnnnnnnnnnnnnnnnnnnnnnnnnnnnnnnnnnnnnnnnnnnnnnnnnnnnnnnnnnnnnnnnnnnnnnnnnnnnnnnnnnnnnnnnnnnnnnnnnnnnnnnnnnnnnnnnnnnnnnnnnnnnnnnnnnnnnnnnnnnnnnnnnnnnnnnnnnnnnnnnnnnnnnnnnnnnnnnnnnnnnnnnnnnnnnnnnnnnnnnnnnnnnnnnnnnnnnnnnnnnnnnnnnnnnnnnnnnnnnnnnnnnnnnnnnnnnnnnnnnnnnnnnnnnnnnnnnnnnnnnnnnnnnnnnnnnnnnnnnnnnnnnnnnnnnnnnnnnnnnnnnnnnnnnnnnnnnnnnnnnnnnnnnnnnnnnnnnnnnnnnnnnnnnnnnnnnnnnnnnnnnnnnnnnnnnnnnnnnnnnnnnnnnnnnnnnnnnnnnnnnnnnnnnnnnnnnnnnnnnnnnnnnnnnnnnnnnnnnnnnnnnnnnnnnnnnnnnnnnnnnnnnnnnnnnnnnnnnnnnnnnnnnnnnnnnnnnnnnnnnnnnnnnnnnnnnnnnnnnnnnnnnnnnnnnnnnnnnnnnnnnnnnnnnnnnnnnnnnnnnnnnnnnnnnnnnnnnnnnnnnnnnnnnnnnnnnnnnnnnnnnnnnnnnnnnnnnnnnnnnnnnnnnnnnnnnnnnnnnnnnnnnnnnnnnnnnnnnnnnnnnnnnnnnnnnnnnnnnnnnnnnnnnnnnnnnnnnnnnnnnnnnnnnnnnnnnnnnnnnnnnnnnnnnnnnnnnnnnnnnnnnnnnnnnnnnnnnnnnnnnnnnnnnnnnnnnnnnnnnnnnnnnnnnnnnnnnnnnnnnnnnnnnnnnnnnnnnnnnnnnnnnnnnnnnnnnnnnnnnnnnnnnnnnnnnnnnnnnnnnnnnnnnnnnnnnnnnnnnnnnnnnnnnnnnnnnnnnnnnnnnnnnnnnnnnnnnnnnnnnnnnnnnnnnnnnnnnnnnnnnnnnnnnnnnnnnnnnnnnnnnnnnnnnnnnnnnnnnnnnnnnnnnnnnnnnnnnnnnnnnnnnnnnnnnnnnnnnnnnnnnnnnnnnnnnnnnnnnnnnnnnnnnnnnnnnnnnnnnnnnnnnnnnnnnnnnnnnnnnnnnnnnnnnnnnnnnnnnnnnnnnnnnnnnnnnnnnnnnnnnnnnnnnnnnnnnnnnnnnnnnnnnnnnnnnnnnnnnnnnnnnnnnnnnnnnnnnnnnnnnnnnnnnnnnnnnnnnnnnnnnnnnnnnnnnnnnnnnnnnnnnnnnnnnnnnnnnnnnnnnnnnnnnnnnnnnnnnnnnnnnnnnnnnnnnnnnnnnnnnnnnnnnnnnnnnnnnnnnnnnnnnnnnnnnnnnnnnnnnnnnnnnnnnnnnnnnnnnnnnnnnnnnnnnnnnnnnnnnnnnnnnnnnnnnnnnnnnnnnnnnnnnnnnnnnnnnnnnnnnnnnnnnnnnnnnnnnnnnnnnnnnnnnnnnnnnnnnnnnnnnnnnnnnnnnnnnnnnnnnnnnnnnnnnnnnnnnnnnnnnnnnnnnnnnnnnnnnnnnnnnnnnnnnnnnnnnnnnnnnnnnnnnnnnnnnnnnnnnnnnnnnnnnnnnnnnnnnnnnnnnnnnnnnnnnnnnnnnnnnnnnnnnnnnnnnnnnnnnnnnnnnnnnnnnnnnnnnnnnnnnnnnnnnnnnnnnnnnnnnnnnnnnnnnnnnnnnnnnnnnnnnnnnnnnnnnnnnnnnnnnnnnnnnnnnnnnnnnnnnnnnnnnnnnnnnnnnnnnnnnnnnnnnnnnnnnnnnnnnnnnnnnnnnnnnnnnnnnnnnnnnnnnnnnnnnnnnnnnnnnnnnnnnnnnnnnnnnnnnnnnnnnnnnnnnnnnnnnnnnnnnnnnnnnnnnnnnnnnnnnnnnnnnnnnnnnnnnnnnnnnnnnnnnnnnnnnnnnnnnnnnnnnnnnnnnnnnnnnnnnnnnnnnnnnnnnnnnnnnnnnnnnnnnnnnnnnnnnnnnnnnnnnnnnnnnnnnnnnnnnnnnnnnnnnnnnnnnnnnnnnnnnnnnnnnnnnnnnnnnnnnnnnnnnnnnnnnnnnnnnnnnnnnnnnnnnnnnnnnnnnnnnnnnnnnnnnnnnnnnnnnnnnnnnnnnnnnnnnnnnnnnnnnnnnnnnnnnnnnnnnnnnnnnnnnnnnnnnnnnnnnnnnnnnnnnnnnnnnnnnnnnnnnnnnnnnnnnnnnnnnnnnnnnnnnnnnnnnnnnnnnnnnnnnnnnnnnnnnnnnnnnnnnnnnnnnnnnnnnnnnnnnnnnnnnnnnnnnnnnnnnnnnnnnnnnnnnnnnnnnnnnnnnnnnnnnnnnnnnnnnnnnnnnnnnnnnnnnnnnnnnnnnnnnnnnnnnnnnnnnnnnnnnnnnnnnnnnnnnnnnnnnnnnnnnnnnnnnnnnnnnnnnnnnnnnnnnnnnnnnnnnnnnnnnnnnnnnnnnnnnnnnnnnnnnnnnnnnnnnnnnnnnnnnnnnnnnnnnnnnnnnnnnnnnnnnnnnnnnnnnnnnnnnnnnnnnnnnnnnnnnnnnnnnnnnnnnnnnnnnnnnnnnnnnnnnnnnnnnnnnnnnnnnnnnnnnnnnnnnnnnnnnnnnnnnnnnnnnnnnnnnnnnnnnnnnnnnnnnnnnnnnnnnnnnnnnnnnnnnnnnnnnnnnnnnnnnnnnnnnnnnnnnnnnnnnnnnnnnnnnnnnnnnnnnnnnnnnnnnnnnnnnnnnnnnnnnnnnnnnnnnnnnnnnnnnnnnnnnnnnnnnnnnnnnnnnnnnnnnnnnnnnnnnnnnnnnnnnnnnnnnnnnnnnnnnnnnnnnnnnnnnnnnnnnnnnnnnnnnnnnnnnnnnnnnnnnnnnnnnnnnnnnnnnnnnnnnnnnnnnnnnnnnnnnnnnnnnnnnnnnnnnnnnnnnnnnnnnnnnnnnnnnnnnnnnnnnnnnnnnnnnnnnnnnnnnnnnnnnnnnnnnnnnnnnnnnnnnnnnnnnnnnnnnnnnnnnnnnnnnnnnnnnnnnnnnnnnnnnnnnnnnnnnnnnnnnnnnnnnnnnnnnnnnnnnnnnnnnnnnnnnnnnnnnnnnnnnnnnnnnnnnnnnnnnnnnnnnnnnnnnnnnnnnnnnnnnnnnnnnnnnnnnnnnnnnnnnnnnnnnnnnnnnnnnnnnnnnnnnnnnnnnnnnnnnnnnnnnnnnnnnnnnnnnnnnnnnnnnnnnnnnnnnnnnnnnnnnnnnnnnnnnnnnnnnnnnnnnnnnnnnnnnnnnnnnnnnnnnnnnnnnnnnnnnnnnnnnnnnnnnnnnnnnnnnnnnnnnnnnnnnnnnnnnnnnnnnnnnnnnnnnnnnnnnnnnnnnnnnnnnnnnnnnnnnnnnnnnnnnnnnnnnnnnnnnnnnnnnnnnnnnnnnnnnnnnnnnnnnnnnnnnnnnnnnnnnnnnnnnnnnnnnnnnnnnnnnnnnnnnnnnnnnnnnnnnnnnnnnnnnnnnnnnnnnnnnnnnnnnnnnnnnnnnnnnnnnnnnnnnnnnnnnnnnnnnnnnnnnnnnnnnnnnnnnnnnnnnnnnnnnnnnnnnnnnnnnnnnnnnnnnnnnnnnnnnnnnnnnnnnnnnnnnnnnnnnnnnnnnnnnnnnnnnnnnnnnnnnnnnnnnnnnnnnnnnnnnnnnnnnnnnnnnnnnnnnnnnnnnnnnnnnnnnnnnnnnnnnnnnnnnnnnnnnnnnnnnnnnnnnnnnnnnnnnnnnnnnnnnnnnnnnnnnnnnnnnnnnnnnnnnnnnnnnnnnnnnnnnnnnnnnnnnnnnnnnnnnnnnnnnnnnnnnnnnnnnnnnnnnnnnnnnnnnnnnnnnnnnnnnnnnnnnnnnnnnnnnnnnnnnnnnnnnnnnnnnnnnnnnnnnnnnnnnnnnnnnnnnnnnnnnnnnnnnnnnnnnnnnnnnnnnnnnnnnnnnnnnnnnnnnnnnnnnnnnnnnnnnnnnnnnnnnnnnnnnnnnnnnnnnnnnnnnnnnnnnnnnnnnnnnnnnnnnnnnnnnnnnnnnnnnnnnnnnnnnnnnnnnnnnnnnnnnnnnnnnnnnnnnnnnnnnnnnnnnnnnnnnnnnnnnnnnnnnnnnnnnnnnnnnnnnnnnnnnnnnnnnnnnnnnnnnnnnnnnnnnnnnnnnnnnnnnnnnnnnnnnnnnnnnnnnnnnnnnnnnnnnnnnnnnnnnnnnnnnnnnnnnnnnnnnnnnnnnnnnnnnnnnnnnnnnnnnnnnnnnnnnnnnnnnnnnnnnnnnnnnnnnnnnnnnnnnnnnnnnnnnnnnnnnnnnnnnnnnnnnnnnnnnnnnnnnnnnnnnnnnnnnnnnnnnnnnnnnnnnnnnnnnnnnnnnnnnnnnnnnnnnnnnnnnnnnnnnnnnnnnnnnnnnnnnnnnnnnnnnnnnnnnnnnnnnnnnnnnnnnnnnnnnnnnnnnnnnnnnnnnnnnnnnnnnnnnnnnnnnnnnnnnnnnnnnnnnnnnnnnnnnnnnnnnnnnnnnnnnnnnnnnnnnnnnnnnnnnnnnnnnnnnnnnnnnnnnnnnnnnnnnnnnnnnnnnnnnnnnnnnnnnnnnnnnnnnnnnnnnnnnnnnnnnnnnnnnnnnnnnnnnnnnnnnnnnnnnnnnnnnnnnnnnnnnnnnnnnnnnnnnnnnnnnnnnnnnnnnnnnnnnnnnnnnnnnnnnnnnnnnnnnnnnnnnnnnnnnnnnnnnnnnnnnnnnnnnnnnnnnnnnnnnnnnnnnnnnnnnnnnnnnnnnnnnnnnnnnnnnnnnnnnnnnnnnnnnnnnnnnnnnnnnnnnnnnnnnnnnnnnnnnnnnnnnnnnnnnnnnnnnnnnnnnnnnnnnnnnnnnnnnnnnnnnnnnnnnnnnnnnnnnnnnnnnnnnnnnnnnnnnnnnnnnnnnnnnnnnnnnnnnnnnnnnnnnnnnnnnnnnnnnnnnnnnnnnnnnnnnnnnnnnnnnnnnnnnnnnnnnnnnnnnnnnnnnnnnnnnnnnnnnnnnnnnnnnnnnnnnnnnnnnnnnnnnnnnnnnnnnnnnnnnnnnnnnnnnnnnnnnnnnnnnnnnnnnnnnnnnnnnnnnnnnnnnnnnnnnnnnnnnnnnnnnnnnnnnnnnnnnnnnnnnnnnnnnnnnnnnnnnnnnnnnnnnnnnnnnnnnnnnnnnnnnnnnnnnnnnnnnnnnnnnnnnnnnnnnnnnnnnnnnnnnnnnnnnnnnnnnnnnnnnnnnnnnnnnnnnnnnnnnnnnnnnnnnnnnnnnnnnnnnnnnnnnnnnnnnnnnnnnnnnnnnnnnnnnnnnnnnnnnnnnnnnnnnnnnnnnnnnnnnnnnnnnnnnnnnnnnnnnnnnnnnnnnnnnnnnnnnnnnnnnnnnnnnnnnnnnnnnnnnnnnnnnnnnnnnnnnnnnnnnnnnnnnnnnnnnnnnnnnnnnnnnnnnnnnnnnnnnnnnnnnnnnnnnnnnnnnnnnnnnnnnnnnnnnnnnnnnnnnnnnnnnnnnnnnnnnnnnnnnnnnnnnnnnnnnnnnnnnnnnnnnnnnnnnnnnnnnnnnnnnnnnnnnnnnnnnnnnnnnnnnnnnnnnnnnnnnnnnnnnnnnnnnnnnnnnnnnnnnnnnnnnnnnnnnnnnnnnnnnnnnnnnnnnnnnnnnnnnnnnnnnnnnnnnnnnnnnnnnnnnnnnnnnnnnnnnnnnnnnnnnnnnnnnnnnnnnnnnnnnnnnnnnnnnnnnnnnnnnnnnnnnnnnnnnnnnnnnnnnnnnnnnnnnnnnnnnnnnnnnnnnnnnnnnnnnnnnnnnnnnnnnnnnnnnnnnnnnnnnnnnnnnnnnnnnnnnnnnnnnnnnnnnnnnnnnnnnnnnnnnnnnnnnnnnnnnnnnnnnnnnnnnnnnnnnnnnnnnnnnnnnnnnnnnnnnnnnnnnnnnnnnnnnnnnnnnnnnnnnnnnnnnnnnnnnnnnnnnnnnnnnnnnnnnnnnnnnnnnnnnnnnnnnnnnnnnnnnnnnnnnnnnnnnnnnnnnnnnnnnnnnnnnnnnnnnnnnnnnnnnnnnnnnnnnnnnnnnnnnnnnnnnnnnnnnnnnnnnnnnnnnnnnnnnnnnnnnnnnnnnnnnnnnnnnnnnnnnnnnnnnnnnnnnnnnnnnnnnnnnnnnnnnnnnnnnnnnnnnnnnnnnnnnnnnnnnnnnnnnnnnnnnnnnnnnnnnnnnnnnnnnnnnnnnnnnnnnnnnnnnnnnnnnnnnnnnnnnnnnnnnnnnnnnnnnnnnnnnnnnnnnnnnnnnnnnnnnnnnnnnnnnnnnnnnnnnnnnnnnnnnnnnnnnnnnnnnnnnnnnnnnnnnnnnnnnnnnnnnnnnnnnnnnnnnnnnnnnnnnnnnnnnnnnnnnnnnnnnnnnnnnnnnnnnnnnnnnnnnnnnnnnnnnnnnnnnnnnnnnnnnnnnnnnnnnnnnnnnnnnnnnnnnnnnnnnnnnnnnnnnnnnnnnnnnnnnnnnnnnnnnnnnnnnnnnnnnnnnnnnnnnnnnnnnnnnnnnnnnnnnnnnnnnnnnnnnnnnnnnnnnnnnnnnnnnnnnnnnnnnnnnnnnnnnnnnnnnnnnnnnnnnnnnnnnnnnnnnnnnnnnnnnnnnnnnnnnnnnnnnnnnnnnnnnnnnnnnnnnnnnnnnnnnnnnnnnnnnnnnnnnnnnnnnnnnnnnnnnnnnnnnnnnnnnnnnnnnnnnnnnnnnnnnnnnnnnnnnnnnnnnnnnnnnnnnnnnnnnnnnnnnnnnnnnnnnnnnnnnnnnnnnnnnnnnnnnnnnnnnnnnnnnnnnnnnnnnnnnnnnnnnnnnnnnnnnnnnnnnnnnnnnnnnnnnnnnnnnnnnnnnnnnnnnnnnnnnnnnnnnnnnnnnnnnnnnnnnnnnnnnnnnnnnnnnnnnnnnnnnnnnnnnnnnnnnnnnnnnnnnnnnnnnnnnnnnnnnnnnnnnnnnnnnnnnnnnnnnnnnnnnnnnnnnnnnnnnnnnnnnnnnnnnnnnnnnnnnnnnnnnnnnnnnnnnnnnnnnnnnnnnnnnnnnnnnnnnnnnnnnnnnnnnnnnnnnnnnnnnnnnnnnnnnnnnnnnnnnnnnnnnnnnnnnnnnnnnnnnnnnnnnnnnnnnnnnnnnnnnnnnnnnnnnnnnnnnnnnnnnnnnnnnnnnnnnnnnnnnnnnnnnnnnnnnnnnnnnnnnnnnnnnnnnnnnnnnnnnnnnnnnnnnnnnnnnnnnnnnnnnnnnnnnnnnnnnnnnnnnnnnnnnnnnnnnnnnnnnnnnnnnnnnnnnnnnnnnnnnnnnnnnnnnnnnnnnnnnnnnnnnnnnnnnnnnnnnnnnnnnnnnnnnnnnnnnnnnnnnnnnnnnnnnnnnnnnnnnnnnnnnnnnnnnnnnnnnnnnnnnnnnnnnnnnnnnnnnnnnnnnnnnnnnnnnnnnnnnnnnnnnnnnnnnnnnnnnnnnnnnnnnnnnnnnnnnnnnnnnnnnnnnnnnnnnnnnnnnnnnnnnnnnnnnnnnnnnnnnnnnnnnnnnnnnnnnnnnnnnnnnnnnnnnnnnnnnnnnnnnnnnnnnnnnnnnnnnnnnnnnnnnnnnnnnnnnnnnnnnnnnnnnnnnnnnnnnnnnnnnnnnnnnnnnnnnnnnnnnnnnnnnnnnnnnnnnnnnnnnnnnnnnnnnnnnnnnnnnnnnnnnnnnnnnnnnnnnnnnnnnnnnnnnnnnnnnnnnnnnnnnnnnnnnnnnnnnnnnnnnnnnnnnnnnnnnnnnnnnnnnnnnnnnnnnnnnnnnnnnnnnnnnnnnnnnnnnnnnnnnnnnnnnnnnnnnnnnnnnnnnnnnnnnnnnnnnnnnnnnnnnnnnnnnnnnnnnnnnnnnnnnnnnnnnnnnnnnnnnnnnnnnnnnnnnnnnnnnnnnnnnnnnnnnnnnnnnnnnnnnnnnnnnnnnnnnnnnnnnnnnnnnnnnnnnnnnnnnnnnnnnnnnnnnnnnnnnnnnnnnnnnnnnnnnnnnnnnnnnnnnnnnnnnnnnnnnnnnnnnnnnnnnnnnnnnnnnnnnnnnnnnnnnnnnnnnnnnnnnnnnnnnnnnnnnnnnnnnnnnnnnnnnnnnnnnnnnnnnnnnnnnnnnnnnnnnnnnnnnnnnnnnnnnnnnnnnnnnnnnnnnnnnnnnnnnnnnnnnnnnnnnnnnnnnnnnnnnnnnnnnnnnnnnnnnnnnnnnnnnnnnnnnnnnnnnnnnnnnnnnnnnnnnnnnnnnnnnnnnnnnnnnnnnnnnnnnnnnnnnnnnnnnnnnnnnnnnnnnnnnnnnnnnnnnnnnnnnnnnnnnnnnnnnnnnnnnnnnnnnnnnnnnnnnnnnnnnnnnnnnnnnnnnnnnnnnnnnnnnnnnnnnnnnnnnnnnnnnnnnnnnnnnnnnnnnnnnnnnnnnnnnnnnnnnnnnnnnnnnnnnnnnnnnnnnnnnnnnnnnnnnnnnnnnnnnnnnnnnnnnnnnnnnnnnnnnnnnnnnnnnnnnnnnnnnnnnnnnnnnnnnnnnnnnnnnnnnnnnnnnnnnnnnnnnnnnnnnnnnnnnnnnnnnnnnnnnnnnnnnnnnnnnnnnnnnnnnnnnnnnnnnnnnnnnnnnnnnnnnnnnnnnnnnnnnnnnnnnnnnnnnnnnnnnnnnnnnnnnnnnnnnnnnnnnnnnnnnnnnnnnnnnnnnnnnnnnnnnnnnnnnnnnnnnnnnnnnnnnnnnnnnnnnnnnnnnnnnnnnnnnnnnnnnnnnnnnnnnnnnnnnnnnnnnnnnnnnnnnnnnnnnnnnnnnnnnnnnnnnnnnnnnnnnnnnnnnnnnnnnnnnnnnnnnnnnnnnnnnnnnnnnnnnnnnnnnnnnnnnnnnnnnnnnnnnnnnnnnnnnnnnnnnnnnnnnnnnnnnnnnnnnnnnnnnnnnnnnnnnnnnnnnnnnnnnnnnnnnnnnnnnnnnnnnnnnnnnnnnnnnnnnnnnnnnnnnnnnnnnnnnnnnnnnnnnnnnnnnnnnnnnnnnnnnnnnnnnnnnnnnnnnnnnnnnnnnnnnnnnnnnnnnnnnnnnnnnnnnnnnnnnnnnnnnnnnnnnnnnnnnnnnnnnnnnnnnnnnnnnnnnnnnnnnnnnnnnnnnnnnnnnnnnnnnnnnnnnnnnnnnnnnnnnnnnnnnnnnnnnnnnnnnnnnnnnnnnnnnnnnnnnnnnnnnnnnnnnnnnnnnnnnnnnnnnnnnnnnnnnnnnnnnnnnnnnnnnnnnnnnnnnnnnnnnnnnnnnnnnnnnnnnnnnnnnnnnnnnnnnnnnnnnnnnnnnnnnnnnnnnnnnnnnnnnnnnnnnnnnnnnnnnnnnnnnnnnnnnnnnnnnnnnnnnnnnnnnnnnnnnnnnnnnnnnnnnnnnnnnnnnnnnnnnnnnnnnnnnnnnnnnnnnnnnnnnnnnnnnnnnnnnnnnnnnnnnnnnnnnnnnnnnnnnnnnnnnnnnnnnnnnnnnnnnnnnnnnnnnnnnnnnnnnnnnnnnnnnnnnnnnnnnnnnnnnnnnnnnnnnnnnnnnnnnnnnnnnnnnnnnnnnnnnnnnnnnnnnnnnnnnnnnnnnnnnnnnnnnnnnnnnnnnnnnnnnnnnnnnnnnnnnnnnnnnnnnnnnnnnnnnnnnnnnnnnnnnnnnnnnnnnnnnnnnnnnnnnnnnnnnnnnnnnnnnnnnnnnnnnnnnnnnnnnnnnnnnnnnnnnnnnnnnnnnnnnnnnnnnnnnnnnnnnnnnnnnnnnnnnnnnnnnnnnnnnnnnnnnnnnnnnnnnnnnnnnnnnnnnnnnnnnnnnnnnnnnnnnnnnnnnnnnnnnnnnnnnnnnnnnnnnnnnnnnnnnnnnnnnnnnnnnnnnnnnnnnnnnnnnnnnnnnnnnnnnnnnnnnnnnnnnnnnnnnnnnnnnnnnnnnnnnnnnnnnnnnnnnnnnnnnnnnnnnnnnnnnnnnnnnnnnnnnnnnnnnnnnnnnnnnnnnnnnnnnnnnnnnnnnnnnnnnnnnnnnnnnnnnnnnnnnnnnnnnnnnnnnnnnnnnnnnnnnnnnnnnnnnnnnnnnnnnnnnnnnnnnnnnnnnnnnnnnnnnnnnnnnnnnnnnnnnnnnnnnnnnnnnnnnnnnnnnnnnnnnnnnnnnnnnnnnnnnnnnnnnnnnnnnnnnnnnnnnnnnnnnnnnnnnnnnnnnnnnnnnnnnnnnnnnnnnnnnnnnnnnnnnnnnnnnnnnnnnnnnnnnnnnnnnnnnnnnnnnnnnnnnnnnnnnnnnnnnnnnnnnnnnnnnnnnnnnnnnnnnnnnnnnnnnnnnnnnnnnnnnnnnnnnnnnnnnnnnnnnnnnnnnnnnnnnnnnnnnnnnnnnnnnnnnnnnnnnnnnnnnnnnnnnnnnnnnnnnnnnnnnnnnnnnnnnnnnnnnnnnnnnnnnnnnnnnnnnnnnnnnnnnnnnnnnnnnnnnnnnnnnnnnnnnnnnnnnnnnnnnnnnnnnnnnnnnnnnnnnnnnnnnnnnnnnnnnnnnnnnnnnnnnnnnnnnnnnnnnnnnnnnnnnnnnnnnnnnnnnnnnnnnnnnnnnnnnnnnnnnnnnnnnnnnnnnnnnnnnnnnnnnnnnnnnnnnnnnnnnnnnnnnnnnnnnnnnnnnnnnnnnnnnnnnnnnnnnnnnnnnnnnnnnnnnnnnnnnnnnnnnnnnnnnnnnnnnnnnnnnnnnnnnnnnnnnnnnnnnnnnnnnnnnnnnnnnnnnnnnnnnnnnnnnnnnnnnnnnnnnnnnnnnnnnnnnnnnnnnnnnnnnnnnnnnnnnnnnnnnnnnnnnnnnnnnnnnnnnnnnnnnnnnnnnnnnnnnnnnnnnnnnnnnnnnnnnnnnnnnnnnnnnnnnnnnnnnnnnnnnnnnnnnnnnnnnnnnnnnnnnnnnnnnnnnnnnnnnnnnnnnnnnnnnnnnnnnnnnnnnnnnnnnnnnnnnnnnnnnnnnnnnnnnnnnnnnnnnnnnnnnnnnnnnnnnnnnnnnnnnnnnnnnnnnnnnnnnnnnnnnnnnnnnnnnnnnnnnnnnnnnnnnnnnnnnnnnnnnnnnnnnnnnnnnnnnnnnnnnnnnnnnnnnnnnnnnnnnnnnnnnnnnnnnnnnnnnnnnnnnnnnnnnnnnnnnnnnnnnnnnnnnnnnnnnnnnnnnnnnnnnnnnnnnnnnnnnnnnnnnnnnnnnnnnnnnnnnnnnnnnnnnnnnnnnnnnnnnnnnnnnnnnnnnnnnnnnnnnnnnnnnnnnnnnnnnnnnnnnnnnnnnnnnnnnnnnnnnnnnnnnnnnnnnnnnnnnnnnnnnnnnnnnnnnnnnnnnnnnnnnnnnnnnnnnnnnnnnnnnnnnnnnnnnnnnnnnnnnnnnnnnnnnnnnnnnnnnnnnnnnnnnnnnnnnnnnnnnnnnnnnnnnnnnnnnnnnnnnnnnnnnnnnnnnnnnnnnnnnnnnnnnnnnnnnnnnnnnnnnnnnnnnnnnnnnnnnnnnnnnnnnnnnnnnnnnnnnnnnnnnnnnnnnnnnnnnnnnnnnnnnnnnnnnnnnnnnnnnnnnnnnnnnnnnnnnnnnnnnnnnnnnnnnnnnnnnnnnnnnnnnnnnnnnnnnnnnnnnnnnnnnnnnnnnnnnnnnnnnnnnnnnnnnnnnnnnnnnnnnnnnnnnnnnnnnnnnnnnnnnnnnnnnnnnnnnnnnnnnnnnnnnnnnnnnnnnnnnnnnnnnnnnnnnnnnnnnnnnnnnnnnnnnnnnnnnnnnnnnnnnnnnnnnnnnnnnnnnnnnnnnnnnnnnnnnnnnnnnnnnnnnnnnnnnnnnnnnnnnnnnnnnnnnnnnnnnnnnnnnnnnnnnnnnnnnnnnnnnnnnnnnnnnnnnnnnnnnnnnnnnnnnnnnnnnnnnnnnnnnnnnnnnnnnnnnnnnnnnnnnnnnnnnnnnnnnnnnnnnnnnnnnnnnnnnnnnnnnnnnnnnnnnnnnnnnnnnnnnnnnnnnnnnnnnnnnnnnnnnnnnnnnnnnnnnnnnnnnnnnnnnnnnnnnnnnnnnnnnnnnnnnnnnnnnnnnnnnnnnnnnnnnnnnnnnnnnnnnnnnnnnnnnnnnnnnnnnnnnnnnnnnnnnnnnnnnnnnnnnnnnnnnnnnnnnnnnnnnnnnnnnnnnnnnnnnnnnnnnnnnnnnnnnnnnnnnnnnnnnnnnnnnnnnnnnnnnnnnnnnnnnnnnnnnnnnnnnnnnnnnnnnnnnnnnnnnnnnnnnnnnnnnnnnnnnnnnnnnnnnnnnnnnnnnnnnnnnnnnnnnnnnnnnnnnnnnnnnnnnnnnnnnnnnnnnnnnnnnnnnnnnnnnnnnnnnnnnnnnnnnnnnnnnnnnnnnnnnnnnnnnnnnnnnnnnnnnnnnnnnnnnnnnnnnnnnnnnnnnnnnnnnnnnnnnnnnnnnnnnnnnnnnnnnnnnnnnnnnnnnnnnnnnnnnnnnnnnnnnnnnnnnnnnnnnnnnnnnnnnnnnnnnnnnnnnnnnnnnnnnnnnnnnnnnnnnnnnnnnnnnnnnnnnnnnnnnnnnnnnnnnnnnnnnnnnnnnnnnnnnnnnnnnnnnnnnnnnnnnnnnnnnnnnnnnnnnnnnnnnnnnnnnnnnnnnnnnnnnnnnnnnnnnnnnnnnnnnnnnnnnnnnnnnnnnnnnnnnnnnnnnnnnnnnnnnnnnnnnnnnnnnnnnnnnnnnnnnnnnnnnnnnnnnnnnnnnnnnnnnnnnnnnnnnnnnnnnnnnnnnnnnnnnnnnnnnnnnnnnnnnnnnnnnnnnnnnnnnnnnnnnnnnnnnnnnnnnnnnnnnnnnnnnnnnnnnnnnnnnnnnnnnnnnnnnnnnnnnnnnnnnnnnnnnnnnnnnnnnnnnnnnnnnnnnnnnnnnnnnnnnnnnnnnnnnnnnnnnnnnnnnnnnnnnnnnnnnnnnnnnnnnnnnnnnnnnnnnnnnnnnnnnnnnnnnnnnnnnnnnnnnnnnnnnnnnnnnnnnnnnnnnnnnnnnnnnnnnnnnnnnnnnnnnnnnnnnnnnnnnnnnnnnnnnnnnnnnnnnnnnnnnnnnnnnnnnnnnnnnnnnnnnnnnnnnnnnnnnnnnnnnnnnnnnnnnnnnnnnnnnnnnnnnnnnnnnnnnnnnnnnnnnnnnnnnnnnnnnnnnnnnnnnnnnnnnnnnnnnnnnnnnnnnnnnnnnnnnnnnnnnnnnnnnnnnnnnnnnnnnnnnnnnnnnnnnnnnnnnnnnnnnnnnnnnnnnnnnnnnnnnnnnnnnnnnnnnnnnnnnnnnnnnnnnnnnnnnnnnnnnnnnnnnnnnnnnnnnnnnnnnnnnnnnnnnnnnnnnnnnnnnnnnnnnnnnnnnnnnnnnnnnnnnnnnnnnnnnnnnnnnnnnnnnnnnnnnnnnnnnnnnnnnnnnnnnnnnnnnnnnnnnnnnnnnnnnnnnnnnnnnnnnnnnnnnnnnnnnnnnnnnnnnnnnnnnnnnnnnnnnnnnnnnnnnnnnnnnnnnnnnnnnnnnnnnnnnnnnnnnnnnnnnnnnnnnnnnnnnnnnnnnnnnnnnnnnnnnnnnnnnnnnnnnnnnnnnnnnnnnnnnnnnnnnnnnnnnnnnnnnnnnnnnnnnnnnnnnnnnnnnnnnnnnnnnnnnnnnnnnnnnnnnnnnnnnnnnnnnnnnnnnnnnnnnnnnnnnnnnnnnnnnnnnnnnnnnnnnnnnnnnnnnnnnnnnnnnnnnnnnnnnnnnnnnnnnnnnnnnnnnnnnnnnnnnnnnnnnnnnnnnnnnnnnnnnnnnnnnnnnnnnnnnnnnnnnnnnnnnnnnnnnnnnnnnnnnnnnnnnnnnnnnnnnnnnnnnnnnnnnnnnnnnnnnnnnnnnnnnnnnnnnnnnnnnnnnnnnnnnnnnnnnnnnnnnnnnnnnnnnnnnnnnnnnnnnnnnnnnnnnnnnnnnnnnnnnnnnnnnnnnnnnnnnnnnnnnnnnnnnnnnnnnnnnnnnnnnnnnnnnnnnnnnnnnnnnnnnnnnnnnnnnnnnnnnnnnnnnnnnnnnnnnnnnnnnnnnnnnnnnnnnnnnnnnnnnnnnnnnnnnnnnnnnnnnnnnnnnnnnnnnnnnnnnnnnnnnnnnnnnnnnnnnnnnnnnnnnnnnnnnnnnnnnnnnnnnnnnnnnnnnnnnnnnnnnnnnnnnnnnnnnnnnnnnnnnnnnnnnnnnnnnnnnnnnnnnnnnnnnnnnnnnnnnnnnnnnnnnnnnnnnnnnnnnnnnnnnnnnnnnnnnnnnnnnnnnnnnnnnnnnnnnnnnnnnnnnnnnnnnnnnnnnnnnnnnnnnnnnnnnnnnnnnnnnnnnnnnnnnnnnnnnnnnnnnnnnnnnnnnnnnnnnnnnnnnnnnnnnnnnnnnnnnnnnnnnnnnnnnnnnnnnnnnnnnnnnnnnnnnnnnnnnnnnnnnnnnnnnnnnnnnnnnnnnnnnnnnnnnnnnnnnnnnnnnnnnnnnnnnnnnnnnnnnnnnnnnnnnnnnnnnnnnnnnnnnnnnnnnnnnnnnnnnnnnnnnnnnnnnnnnnnnnnnnnnnnnnnnnnnnnnnnnnnnnnnnnnnnnnnnnnnnnnnnnnnnnnnnnnnnnnnnnnnnnnnnnnnnnnnnnnnnnnnnnnnnnnnnnnnnnnnnnnnnnnnnnnnnnnnnnnnnnnnnnnnnnnnnnnnnnnnnnnnnnnnnnnnnnnnnnnnnnnnnnnnnnnnnnnnnnnnnnnnnnnnnnnnnnnnnnnnnnnnnnnnnnnnnnnnnnnnnnnnnnnnnnnnnnnnnnnnnnnnnnnnnnnnnnnnnnnnnnnnnnnnnnnnnnnnnnnnnnnnnnnnnnnnnnnnnnnnnnnnnnnnnnnnnnnnnnnnnnnnnnnnnnnnnnnnnnnnnnnnnnnnnnnnnnnnnnnnnnnnnnnnnnnnnnnnnnnnnnnnnnnnnnnnnnnnnnnnnnnnnnnnnnnnnnnnnnnnnnnnnnnnnnnnnnnnnnnnnnnnnnnnnnnnnnnnnnnnnnnnnnnnnnnnnnnnnnnnnnnnnnnnnnnnnnnnnnnnnnnnnnnnnnnnnnnnnnnnnnnnnnnnnnnnnnnnnnnnnnnnnnnnnnnnnnnnnnnnnnnnnnnnnnnnnnnnnnnnnnnnnnnnnnnnnnnnnnnnnnnnnnnnnnnnnnnnnnnnnnnnnnnnnnnnnnnnnnnnnnnnnnnnnnnnnnnnnnnnnnnnnnnnnnnnnnnnnnnnnnnnnnnnnnnnnnnnnnnnnnnnnnnnnnnnnnnnnnnnnnnnnnnnnnnnnnnnnnnnnnnnnnnnnnnnnnnnnnnnnnnnnnnnnnnnnnnnnnnnnnnnnnnnnnnnnnnnnnnnnnnnnnnnnnnnnnnnnnnnnnnnnnnnnnnnnnnnnnnnnnnnnnnnnnnnnnnnnnnnnnnnnnnnnnnnnnnnnnnnnnnnnnnnnnnnnnnnnnnnnnnnnnnnnnnnnnnnnnnnnnnnnnnnnnnnnnnnnnnnnnnnnnnnnnnnnnnnnnnnnnnnnnnnnnnnnnnnnnnnnnnnnnnnnnnnnnnnnnnnnnnnnnnnnnnnnnnnnnnnnnnnnnnnnnnnnnnnnnnnnnnnnnnnnnnnnnnnnnnnnnnnnnnnnnnnnnnnnnnnnnnnnnnnnnnnnnnnnnnnnnnnnnnnnnnnnnnnnnnnnnnnnnnnnnnnnnnnnnnnnnnnnnnnnnnnnnnnnnnnnnnnnnnnnnnnnnnnnnnnnnnnnnnnnnnnnnnnnnnnnnnnnnnnnnnnnnnnnnnnnnnnnnnnnnnnnnnnnnnnnnnnnnnnnnnnnnnnnnnnnnnnnnnnnnnnnnnnnnnnnnnnnnnnnnnnnnnnnnnnnnnnnnnnnnnnnnnnnnnnnnnnnnnnnnnnnnnnnnnnnnnnnnnnnnnnnnnnnnnnnnnnnnnnnnnnnnnnnnnnnnnnnnnnnnnnnnnnnnnnnnnnnnnnnnnnnnnnnnnnnnnnnnnnnnnnnnnnnnnnnnnnnnnnnnnnnnnnnnnnnnnnnnnnnnnnnnnnnnnnnnnnnnnnnnnnnnnnnnnnnnnnnnnnnnnnnnnnnnnnnnnnnnnnnnnnnnnnnnnnnnnnnnnnnnnnnnnnnnnnnnnnnnnnnnnnnnnnnnnnnnnnnnnnnnnnnnnnnnnnnnnnnnnnnnnnnnnnnnnnnnnnnnnnnnnnnnnnnnnnnnnnnnnnnnnnnnnnnnnnnnnnnnnnnnnnnnnnnnnnnnnnnnnnnnnnnnnnnnnnnnnnnnnnnnnnnnnnnnnnnnnnnnnnnnnnnnnnnnnnnnnnnnnnnnnnnnnnnnnnnnnnnnnnnnnnnnnnnnnnnnnnnnnnnnnnnnnnnnnnnnnnnnnnnnnnnnnnnnnnnnnnnnnnnnnnnnnnnnnnnnnnnnnnnnnnnnnnnnnnnnnnnnnnnnnnnnnnnnnnnnnnnnnnnnnnnnnnnnnnnnnnnnnnnnnnnnnnnnnnnnnnnnnnnnnnnnnnnnnnnnnnnnnnnnnnnnnnnnnnnnnnnnnnnnnnnnnnnnnnnnnnnnnnnnnnnnnnnnnnnnnnnnnnnnnnnnnnnnnnnnnnnnnnnnnnnnnnnnnnnnnnnnnnnnnnnnnnnnnnnnnnnnnnnnnnnnnnnnnnnnnnnnnnnnnnnnnnnnnnnnnnnnnnnnnnnnnnnnnnnnnnnnnnnnnnnnnnnnnnnnnnnnnnnnnnnnnnnnnnnnnnnnnnnnnnnnnnnnnnnnnnnnnnnnnnnnnnnnnnnnnnnnnnnnnnnnnnnnnnnnnnnnnnnnnnnnnnnnnnnnnnnnnnnnnnnnnnnnnnnnnnnnnnnnnnnnnnnnnnnnnnnnnnnnnnnnnnnnnnnnnnnnnnnnnnnnnnnnnnnnnnnnnnnnnnnnnnnnnnnnnnnnnnnnnnnnnnnnnnnnnnnnnnnnnnnnnnnnnnnnnnnnnnnnnnnnnnnnnnnnnnnnnnnnnnnnnnnnnnnnnnnnnnnnnnnnnnnnnnnnnnnnnnnnnnnnnnnnnnnnnnnnnnnnnnnnnnnnnnnnnnnnnnnnnnnnnnnnnnnnnnnnnnnnnnnnnnnnnnnnnnnnnnnnnnnnnnnnnnnnnnnnnnnnnnnnnnnnnnnnnnnnnnnnnnnnnnnnnnnnnnnnnnnnnnnnnnnnnnnnnnnnnnnnnnnnnnnnnnnnnnnnnnnnnnnnnnnnnnnnnnnnnnnnnnnnnnnnnnnnnnnnnnnnnnnnnnnnnnnnnnnnnnnnnnnnnnnnnnnnnnnnnnnnnnnnnnnnnnnnnnnnnnnnnnnnnnnnnnnnnnnnnnnnnnnnnnnnnnnnnnnnnnnnnnnnnnnnnnnnnnnnnnnnnnnnnnnnnnnnnnnnnnnnnnnnnnnnnnnnnnnnnnnnnnnnnnnnnnnnnnnnnnnnnnnnnnnnnnnnnnnnnnnnnnnnnnnnnnnnnnnnnnnnnnnnnnnnnnnnnnnnnnnnnnnnnnnnnnnnnnnnnnnnnnnnnnnnnnnnnnnnnnnnnnnnnnnnnnnnnnnnnnnnnnnnnnnnnnnnnnnnnnnnnnnnnnnnnnnnnnnnnnnnnnnnnnnnnnnnnnnnnnnnnnnnnnnnnnnnnnnnnnnnnnnnnnnnnnnnnnnnnnnnnnnnnnnnnnnnnnnnnnnnnnnnnnnnnnnnnnnnnnnnnnnnnnnnnnnnnnnnnnnnnnnnnnnnnnnnnnnnnnnnnnnnnnnnnnnnnnnnnnnnnnnnnnnnnnnnnnnnnnnnnnnnnnnnnnnnnnnnnnnnnnnnnnnnnnnnnnnnnnnnnnnnnnnnnnnnnnnnnnnnnnnnnnnnnnnnnnnnnnnnnnnnnnnnnnnnnnnnnnnnnnnnnnnnnnnnnnnnnnnnnnnnnnnnnnnnnnnnnnnnnnnnnnnnnnnnnnnnnnnnnnnnnnnnnnnnnnnnnnnnnnnnnnnnnnnnnnnnnnnnnnnnnnnnnnnnnnnnnnnnnnnnnnnnnnnnnnnnnnnnnnnnnnnnnnnnnnnnnnnnnnnnnnnnnnnnnnnnnnnnnnnnnnnnnnnnnnnnnnnnnnnnnnnnnnnnnnnnnnnnnnnnnnnnnnnnnnnnnnnnnnnnnnnnnnnnnnnnnnnnnnnnnnnnnnnnnnnnnnnnnnnnnnnnnnnnnnnnnnnnnnnnnnnnnnnnnnnnnnnnnnnnnnnnnnnnnnnnnnnnnnnnnnnnnnnnnnnnnnnnnnnnnnnnnnnnnnnnnnnnnnnnnnnnnnnnnnnnnnnnnnnnnnnnnnnnnnnnnnnnnnnnnnnnnnnnnnnnnnnnnnnnnnnnnnnnnnnnnnnnnnnnnnnnnnnnnnnnnnnnnnnnnnnnnnnnnnnnnnnnnnnnnnnnnnnnnnnnnnnnnnnnnnnnnnnnnnnnnnnnnnnnnnnnnnnnnnnnnnnnnnnnnnnnnnnnnnnnnnnnnnnnnnnnnnnnnnnnnnnnnnnnnnnnnnnnnnnnnnnnnnnnnnnnnnnnnnnnnnnnnnnnnnnnnnnnnnnnnnnnnnnnnnnnnnnnnnnnnnnnnnnnnnnnnnnnnnnnnnnnnnnnnnnnnnnnnnnnnnnnnnnnnnnnnnnnnnnnnnnnnnnnnnnnnnnnnnnnnnnnnnnnnnnnnnnnnnnnnnnnnnnnnnnnnnnnnnnnnnnnnnnnnnnnnnnnnnnnnnnnnnnnnnnnnnnnnnnnnnnnnnnnnnnnnnnnnnnnnnnnnnnnnnnnnnnnnnnnnnnnnnnnnnnnnnnnnnnnnnnnnnnnnnnnnnnnnnnnnnnnnnnnnnnnnnnnnnnnnnnnnnnnnnnnnnnnnnnnnnnnnnnnnnnnnnnnnnnnnnnnnnnnnnnnnnnnnnnnnnnnnnnnnnnnnnnnnnnnnnnnnnnnnnnnnnnnnnnnnnnnnnnnnnnnnnnnnnnnnnnnnnnnnnnnnnnnnnnnnnnnnnnnnnnnnnnnnnnnnnnnnnnnnnnnnnnnnnnnnnnnnnnnnnnnnnnnnnnnnnnnnnnnnnnnnnnnnnnnnnnnnnnnnnnnnnnnnnnnnnnnnnnnnnnnnnnnnnnnnnnnnnnnnnnnnnnnnnnnnnnnnnnnnnnnnnnnnnnnnnnnnnnnnnnnnnnnnnnnnnnnnnnnnnnnnnnnnnnnnnnnnnnnnnnnnnnnnnnnnnnnnnnnnnnnnnnnnnnnnnnnnnnnnnnnnnnnnnnnnnnnnnnnnnnnnnnnnnnnnnnnnnnnnnnnnnnnnnnnnnnnnnnnnnnnnnnnnnnnnnnnnnnnnnnnnnnnnnnnnnnnnnnnnnnnnnnnnnnnnnnnnnnnnnnnnnnnnnnnnnnnnnnnnnnnnnnnnnnnnnnnnnnnnnnnnnnnnnnnnnnnnnnnnnnnnnnnnnnnnnnnnnnnnnnnnnnnnnnnnnnnnnnnnnnnnnnnnnnnnnnnnnnnnnnnnnnnnnnnnnnnnnnnnnnnnnnnnnnnnnnnnnnnnnnnnnnnnnnnnnnnnnnnnnnnnnnnnnnnnnnnnnnnnnnnnnnnnnnnnnnnnnnnnnnnnnnnnnnnnnnnnnnnnnnnnnnnnnnnnnnnnnnnnnnnnnnnnnnnnnnnnnnnnnnnnnnnnnnnnnnnnnnnnnnnnnnnnnnnnnnnnnnnnnnnnnnnnnnnnnnnnnnnnnnnnnnnnnnnnnnnnnnnnnnnnnnnnnnnnnnnnnnnnnnnnnnnnnnnnnnnnnnnnnnnnnnnnnnnnnnnnnnnnnnnnnnnnnnnnnnnnnnnnnnnnnnnnnnnnnnnnnnnnnnnnnnnnnnnnnnnnnnnnnnnnnnnnnnnnnnnnnnnnnnnnnnnnnnnnnnnnnnnnnnnnnnnnnnnnnnnnnnnnnnnnnnnnnnnnnnnnnnnnnnnnnnnnnnnnnnnnnnnnnnnnnnnnnnnnnnnnnnnnnnnnnnnnnnnnnnnnnnnnnnnnnnnnnnnnnnnnnnnnnnnnnnnnnnnnnnnnnnnnnnnnnnnnnnnnnnnnnnnnnnnnnnnnnnnnnnnnnnnnnnnnnnnnnnnnnnnnnnnnnnnnnnnnnnnnnnnnnnnnnnnnnnnnnnnnnnnnnnnnnnnnnnnnnnnnnnnnnnnnnnnnnnnnnnnnnnnnnnnnnnnnnnnnnnnnnnnnnnnnnnnnnnnnnnnnnnnnnnnnnnnnnnnnnnnnnnnnnnnnnnnnnnnnnnnnnnnnnnnnnnnnnnnnnnnnnnnnnnnnnnnnnnnnnnnnnnnnnnnnnnnnnnnnnnnnnnnnnnnnnnnnnnnnnnnnnnnnnnnnnnnnnnnnnnnnnnnnnnnnnnnnnnnnnnnnnnnnnnnnnnnnnnnnnnnnnnnnnnnnnnnnnnnnnnnnnnnnnnnnnnnnnnnnnnnnnnnnnnnnnnnnnnnnnnnnnnnnnnnnnnnnnnnnnnnnnnnnnnnnnnnnnnnnnnnnnnnnnnnnnnnnnnnnnnnnnnnnnnnnnnnnnnnnnnnnnnnnnnnnnnnnnnnnnnnnnnnnnnnnnnnnnnnnnnnnnnnnnnnnnnnnnnnnnnnnnnnnnnnnnnnnnnnnnnnnnnnnnnnnnnnnnnnnnnnnnnnnnnnnnnnnnnnnnnnnnnnnnnnnnnnnnnnnnnnnnnnnnnnnnnnnnnnnnnnnnnnnnnnnnnnnnnnnnnnnnnnnnnnnnnnnnnnnnnnnnnnnnnnnnnnnnnnnnnnnnnnnnnnnnnnnnnnnnnnnnnnnnnnnnnnnnnnnnnnnnnnnnnnnnnnnnnnnnnnnnnnnnnnnnnnnnnnnnnnnnnnnnnnnnnnnnnnnnnnnnnnnnnnnnnnnnnnnnnnnnnnnnnnnnnnnnnnnnnnnnnnnnnnnnnnnnnnnnnnnnnnnnnnnnnnnnnnnnnnnnnnnnnnnnnnnnnnnnnnnnnnnnnnnnnnnnnnnnnnnnnnnnnnnnnnnnnnnnnnnnnnnnnnnnnnnnnnnnnnnnnnnnnnnnnnnnnnnnnnnnnnnnnnnnnnnnnnnnnnnnnnnnnnnnnnnnnnnnnnnnnnnnnnnnnnnnnnnnnnnnnnnnnnnnnnnnnnnnnnnnnnnnnnnnnnnnnnnnnnnnnnnnnnnnnnnnnnnnnnnnnnnnnnnnnnnnnnnnnnnnnnnnnnnnnnnnnnnnnnnnnnnnnnnnnnnnnnnnnnnnnnnnnnnnnnnnnnnnnnnnnnnnnnnnnnnnnnnnnnnnnnnnnnnnnnnnnnnnnnnnnnnnnnnnnnnnnnnnnnnnnnnnnnnnnnnnnnnnnnnnnnnnnnnnnnnnnnnnnnnnnnnnnnnnnnnnnnnnnnnnnnnnnnnnnnnnnnnnnnnnnnnnnnnnnnnnnnnnnnnnnnnnnnnnnnnnnnnnnnnnnnnnnnnnnnnnnnnnnnnnnnnnnnnnnnnnnnnnnnnnnnnnnnnnnnnnnnnnnnnnnnnnnnnnnnnnnnnnnnnnnnnnnnnnnnnnnnnnnnnnnnnnnnnnnnnnnnnnnnnnnnnnnnnnnnnnnnnnnnnnnnnnnnnnnnnnnnnnnnnnnnnnnnnnnnnnnnnnnnnnnnnnnnnnnnnnnnnnnnnnnnnnnnnnnnnnnnnnnnnnnnnnnnnnnnnnnnnnnnnnnnnnnnnnnnnnnnnnnnnnnnnnnnnnnnnnnnnnnnnnnnnnnnnnnnnnnnnnnnnnnnnnnnnnnnnnnnnnnnnnnnnnnnnnnnnnnnnnnnnnnnnnnnnnnnnnnnnnnnnnnnnnnnnnnnnnnnnnnnnnnnnnnnnnnnnnnnnnnnnnnnnnnnnnnnnnnnnnnnnnnnnnnnnnnnnnnnnnnnnnnnnnnnnnnnnnnnnnnnnnnnnnnnnnnnnnnnnnnnnnnnnnnnnnnnnnnnnnnnnnnnnnnnnnnnnnnnnnnnnnnnnnnnnnnnnnnnnnnnnnnnnnnnnnnnnnnnnnnnnnnnnnnnnnnnnnnnnnnnnnnnnnnnnnnnnnnnnnnnnnnnnnnnnnnnnnnnnnnnnnnnnnnnnnnnnnnnnnnnnnnnnnnnnnnnnnnnnnnnnnnnnnnnnnnnnnnnnnnnnnnnnnnnnnnnnnnnnnnnnnnnnnnnnnnnnnnnnnnnnnnnnnnnnnnnnnnnnnnnnnnnnnnnnnnnnnnnnnnnnnnnnnnnnnnnnnnnnnnnnnnnnnnnnnnnnnnnnnnnnnnnnnnnnnnnnnnnnnnnnnnnnnnnnnnnnnnnnnnnnnnnnnnnnnnnnnnnnnnnnnnnnnnnnnnnnnnnnnnnnnnnnnnnnnnnnnnnnnnnnnnnnnnnnnnnnnnnnnnnnnnnnnnnnnnnnnnnnnnnnnnnnnnnnnnnnnnnnnnnnnnnnnnnnnnnnnnnnnnnnnnnnnnnnnnnnnnnnnnnnnnnnnnnnnnnnnnnnnnnnnnnnnnnnnnnnnnnnnnnnnnnnnnnnnnnnnnnnnnnnnnnnnnnnnnnnnnnnnnnnnnnnnnnnnnnnnnnnnnnnnnnnnnnnnnnnnnnnnnnnnnnnnnnnnnnnnnnnnnnnnnnnnnnnnnnnnnnnnnnnnnnnnnnnnnnnnnnnnnnnnnnnnnnnnnnnnnnnnnnnnnnnnnnnnnnnnnnnnnnnnnnnnnnnnnnnnnnnnnnnnnnnnnnnnnnnnnnnnnnnnnnnnnnnnnnnnnnnnnnnnnnnnnnnnnnnnnnnnnnnnnnnnnnnnnnnnnnnnnnnnnnnnnnnnnnnnnnnnnnnnnnnnnnnnnnnnnnnnnnnnnnnnnnnnnnnnnnnnnnnnnnnnnnnnnnnnnnnnnnnnnnnnnnnnnnnnnnnnnnnnnnnnnnnnnnnnnnnnnnnnnnnnnnnnnnnnnnnnnnnnnnnnnnnnnnnnnnnnnnnnnnnnnnnnnnnnnnnnnnnnnnnnnnnnnnnnnnnnnnnnnnnnnnnnnnnnnnnnnnnnnnnnnnnnnnnnnnnnnnnnnnnnnnnnnnnnnnnnnnnnnnnnnnnnnnnnnnnnnnnnnnnnnnnnnnnnnnnnnnnnnnnnnnnnnnnnnnnnnnnnnnnnnnnnnnnnnnnnnnnnnnnnnnnnnnnnnnnnnnnnnnnnnnnnnnnnnnnnnnnnnnnnnnnnnnnnnnnnnnnnnnnnnnnnnnnnnnnnnnnnnnnnnnnnnnnnnnnnnnnnnnnnnnnnnnnnnnnnnnnnnnnnnnnnnnnnnnnnnnnnnnnnnnnnnnnnnnnnnnnnnnnnnnnnnnnnnnnnnnnnnnnnnnnnnnnnnnnnnnnnnnnnnnnnnnnnnnnnnnnnnnnnnnnnnnnnnnnnnnnnnnnnnnnnnnnnnnnnnnnnnnnnnnnnnnnnnnnnnnnnnnnnnnnnnnnnnnnnnnnnnnnnnnnnnnnnnnnnnnnnnnnnnnnnnnnnnnnnnnnnnnnnnnnnnnnnnnnnnnnnnnnnnnnnnnnnnnnnnnnnnnnnnnnnnnnnnnnnnnnnnnnnnnnnnnnnnnnnnnnnnnnnnnnnnnnnnnnnnnnnnnnnnnnnnnnnnnnnnnnnnnnnnnnnnnnnnnnnnnnnnnnnnnnnnnnnnnnnnnnnnnnnnnnnnnnnnnnnnnnnnnnnnnnnnnnnnnnnnnnnnnnnnnnnnnnnnnnnnnnnnnnnnnnnnnnnnnnnnnnnnnnnnnnnnnnnnnnnnnnnnnnnnnnnnnnnnnnnnnnnnnnnnnnnnnnnnnnnnnnnnnnnnnnnnnnnnnnnnnnnnnnnnnnnnnnnnnnnnnnnnnnnnnnnnnnnnnnnnnnnnnnnnnnnnnnnnnnnnnnnnnnnnnnnnnnnnnnnnnnnnnnnnnnnnnnnnnnnnnnnnnnnnnnnnnnnnnnnnnnnnnnnnnnnnnnnnnnnnnnnnnnnnnnnnnnnnnnnnnnnnnnnnnnnnnnnnnnnnnnnnnnnnnnnnnnnnnnnnnnnnnnnnnnnnnnnnnnnnnnnnnnnnnnnnnnnnnnnnnnnnnnnnnnnnnnnnnnnnnnnnnnnnnnnnnnnnnnnnnnnnnnnnnnnnnnnnnnnnnnnnnnnnnnnnnnnnnnnnnnnnnnnnnnnnnnnnnnnnnnnnnnnnnnnnnnnnnnnnnnnnnnnnnnnnnnnnnnnnnnnnnnnnnnnnnnnnnnnnnnnnnnnnnnnnnnnnnnnnnnnnnnnnnnnnnnnnnnnnnnnnnnnnnnnnnnnnnnnnnnnnnnnnnnnnnnnnnnnnnnnnnnnnnnnnnnnnnnnnnnnnnnnnnnnnnnnnnnnnnnnnnnnnnnnnnnnnnnnnnnnnnnnnnnnnnnnnnnnnnnnnnnnnnnnnnnnnnnnnnnnnnnnnnnnnnnnnnnnnnnnnnnnnnnnnnnnnnnnnnnnnnnnnnnnnnnnnnnnnnnnnnnnnnnnnnnnnnnnnnnnnnnnnnnnnnnnnnnnnnnnnnnnnnnnnnnnnnnnnnnnnnnnnnnnnnnnnnnnnnnnnnnnnnnnnnnnnnnnnnnnnnnnnnnnnnnnnnnnnnnnnnnnnnnnnnnnnnnnnnnnnnnnnnnnnnnnnnnnnnnnnnnnnnnnnnnnnnnnnnnnnnnnnnnnnnnnnnnnnnnnnnnnnnnnnnnnnnnnnnnnnnnnnnnnnnnnnnnnnnnnnnnnnnnnnnnnnnnnnnnnnnnnnnnnnnnnnnnnnnnnnnnnnnnnnnnnnnnnnnnnnnnnnnnnnnnnnnnnnnnnnnnnnnnnnnnnnnnnnnnnnnnnnnnnnnnnnnnnnnnnnnnnnnnnnnnnnnnnnnnnnnnnnnnnnnnnnnnnnnnnnnnnnnnnnnnnnnnnnnnnnnnnnnnnnnnnnnnnnnnnnnnnnnnnnnnnnnnnnnnnnnnnnnnnnnnnnnnnnnnnnnnnnnnnnnnnnnnnnnnnnnnnnnnnnnnnnnnnnnnnnnnnnnnnnnnnnnnnnnnnnnnnnnnnnnnnnnnnnnnnnnnnnnnnnnnnnnnnnnnnnnnnnnnnnnnnnnnnnnnnnnnnnnnnnnnnnnnnnnnnnnnnnnnnnnnnnnnnnnnnnnnnnnnnnnnnnnnnnnnnnnnnnnnnnnnnnnnnnnnnnnnnnnnnnnnnnnnnnnnnnnnnnnnnnnnnnnnnnnnnnnnnnnnnnnnnnnnnnnnnnnnnnnnnnnnnnnnnnnnnnnnnnnnnnnnnnnnnnnnnnnnnnnnnnnnnnnnnnnnnnnnnnnnnnnnnnnnnnnnnnnnnnnnnnnnnnnnnnnnnnnnnnnnnnnnnnnnnnnnnnnnnnnnnnnnnnnnnnnnnnnnnnnnnnnnnnnnnnnnnnnnnnnnnnnnnnnnnnnnnnnnnnnnnnnnnnnnnnnnnnnnnnnnnnnnnnnnnnnnnnnnnnnnnnnnnnnnnnnnnnnnnnnnnnnnnnnnnnnnnnnnnnnnnnnnnnnnnnnnnnnnnnnnnnnnnnnnnnnnnnnnnnnnnnnnnnnnnnnnnnnnnnnnnnnnnnnnnnnnnnnnnnnnnnnnnnnnnnnnnnnnnnnnnnnnnnnnnnnnnnnnnnnnnnnnnnnnnnnnnnnnnnnnnnnnnnnnnnnnnnnnnnnnnnnnnnnnnnnnnnnnnnnnnnnnnnnnnnnnnnnnnnnnnnnnnnnnnnnnnnnnnnnnnnnnnnnnnnnnnnnnnnnnnnnnnnnnnnnnnnnnnnnnnnnnnnnnnnnnnnnnnnnnnnnnnnnnnnnnnnnnnnnnnnnnnnnnnnnnnnnnnnnnnnnnnnnnnnnnnnnnnnnnnnnnnnnnnnnnnnnnnnnnnnnnnnnnnnnnnnnnnnnnnnnnnnnnnnnnnnnnnnnnnnnnnnnnnnnnnnnnnnnnnnnnnnnnnnnnnnnnnnnnnnnnnnnnnnnnnnnnnnnnnnnnnnnnnnnnnnnnnnnnnnnnnnnnnnnnnnnnnnnnnnnnnnnnnnnnnnnnnnnnnnnnnnnnnnnnnnnnnnnnnnnnnnnnnnnnnnnnnnnnnnnnnnnnnnnnnnnnnnnnnnnnnnnnnnnnnnnnnnnnnnnnnnnnnnnnnnnnnnnnnnnnnnnnnnnnnnnnnnnnnnnnnnnnnnnnnnnnnnnnnnnnnnnnnnnnnnnnnnnnnnnnnnnnnnnnnnnnnnnnnnnnnnnnnnnnnnnnnnnnnnnnnnnnnnnnnnnnnnnnnnnnnnnnnnnnnnnnnnnnnnnnnnnnnnnnnnnnnnnnnnnnnnnnnnnnnnnnnnnnnnnnnnnnnnnnnnnnnnnnnnnnnnnnnnnnnnnnnnnnnnnnnnnnnnnnnnnnnnnnnnnnnnnnnnnnnnnnnnnnnnnnnnnnnnnnnnnnnnnnnnnnnnnnnnnnnnnnnnnnnnnnnnnnnnnnnnnnnnnnnnnnnnnnnnnnnnnnnnnnnnnnnnnnnnnnnnnnnnnnnnnnnnnnnnnnnnnnnnnnnnnnnnnnnnnnnnnnnnnnnnnnnnnnnnnnnnnnnnnnnnnnnnnnnnnnnnnnnnnnnnnnnnnnnnnnnnnnnnnnnnnnnnnnnnnnnnnnnnnnnnnnnnnnnnnnnnnnnnnnnnnnnnnnnnnnnnnnnnnnnnnnnnnnnnnnnnnnnnnnnnnnnnnnnnnnnnnnnnnnnnnnnnnnnnnnnnnnnnnnnnnnnnnnnnnnnnnnnnnnnnnnnnnnnnnnnnnnnnnnnnnnnnnnnnnnnnnnnnnnnnnnnnnnnnnnnnnnnnnnnnnnnnnnnnnnnnnnnnnnnnnnnnnnnnnnnnnnnnnnnnnnnnnnnnnnnnnnnnnnnnnnnnnnnnnnnnnnnnnnnnnnnnnnnnnnnnnnnnnnnnnnnnnnnnnnnnnnnnnnnnnnnnnnnnnnnnnnnnnnnnnnnnnnnnnnnnnnnnnnnnnnnnnnnnnnnnnnnnnnnnnnnnnnnnnnnnnnnnnnnnnnnnnnnnnnnnnnnnnnnnnnnnnnnnnnnnnnnnnnnnnnnnnnnnnnnnnnnnnnnnnnnnnnnnnnnnnnnnnnnnnnnnnnnnnnnnnnnnnnnnnnnnnnnnnnnnnnnnnnnnnnnnnnnnnnnnnnnnnnnnnnnnnnnnnnnnnnnnnnnnnnnnnnnnnnnnnnnnnnnnnnnnnnnnnnnnnnnnnnnnnnnnnnnnnnnnnnnnnnnnnnnnnnnnnnnnnnnnnnnnnnnnnnnnnnnnnnnnnnnnnnnnnnnnnnnnnnnnnnnnnnnnnnnnnnnnnnnnnnnnnnnnnnnnnnnnnnnnnnnnnnnnnnnnnnnnnnnnnnnnnnnnnnnnnnnnnnnnnnnnnnnnnnnnnnnnnnnnnnnnnnnnnnnnnnnnnnnnnnnnnnnnnnnnnnnnnnnnnnnnnnnnnnnnnnnnnnnnnnnnnnnnnnnnnnnnnnnnnnnnnnnnnnnnnnnnnnnnnnnnnnnnnnnnnnnnnnnnnnnnnnnnnnnnnnnnnnnnnnnnnnnnnnnnnnnnnnnnnnnnnnnnnnnnnnnnnnnnnnnnnnnnnnnnnnnnnnnnnnnnnnnnnnnnnnnnnnnnnnnnnnnnnnnnnnnnnnnnnnnnnnnnnnnnnnnnnnnnnnnnnnnnnnnnnnnnnnnnnnnnnnnnnnnnnnnnnnnnnnnnnnnnnnnnnnnnnnnnnnnnnnnnnnnnnnnnnnnnnnnnnnnnnnnnnnnnnnnnnnnnnnnnnnnnnnnnnnnnnnnnnnnnnnnnnnnnnnnnnnnnnnnnnnnnnnnnnnnnnnnnnnnnnnnnnnnnnnnnnnnnnnnnnnnnnnnnnnnnnnnnnnnnnnnnnnnnnnnnnnnnnnnnnnnnnnnnnnnnnnnnnnnnnnnnnnnnnnnnnnnnnnnnnnnnnnnnnnnnnnnnnnnnnnnnnnnnnnnnnnnnnnnnnnnnnnnnnnnnnnnnnnnnnnnnnnnnnnnnnnnnnnnnnnnnnnnnnnnnnnnnnnnnnnnnnnnnnnnnnnnnnnnnnnnnnnnnnnnnnnnnnnnnnnnnnnnnnnnnnnnnnnnnnnnnnnnnnnnnnnnnnnnnnnnnnnnnnnnnnnnnnnnnnnnnnnnnnnnnnnnnnnnnnnnnnnnnnnnnnnnnnnnnnnnnnnnnnnnnnnnnnnnnnnnnnnnnnnnnnnnnnnnnnnnnnnnnnnnnnnnnnnnnnnnnnnnnnnnnnnnnnnnnnnnnnnnnnnnnnnnnnnnnnnnnnnnnnnnnnnnnnnnnnnnnnnnnnnnnnnnnnnnnnnnnnnnnnnnnnnnnnnnnnnnnnnnnnnnnnnnnnnnnnnnnnnnnnnnnnnnnnnnnnnnnnnnnnnnnnnnnnnnnnnnnnnnnnnnnnnnnnnnnnnnnnnnnnnnnnnnnnnnnnnnnnnnnnnnnnnnnnnnnnnnnnnnnnnnnnnnnnnnnnnnnnnnnnnnnnnnnnnnnnnnnnnnnnnnnnnnnnnnnnnnnnnnnnnnnnnnnnnnnnnnnnnnnnnnnnnnnnnnnnnnnnnnnnnnnnnnnnnnnnnnnnnnnnnnnnnnnnnnnnnnnnnnnnnnnnnnnnnnnnnnnnnnnnnnnnnnnnnnnnnnnnnnnnnnnnnnnnnnnnnnnnnnnnnnnnnnnnnnnnnnnnnnnnnnnnnnnnnnnnnnnnnnnnnnnnnnnnnnnnnnnnnnnnnnnnnnnnnnnnnnnnnnnnnnnnnnnnnnnnnnnnnnnnnnnnnnnnnnnnnnnnnnnnnnnnnnnnnnnnnnnnnnnnnnnnnnnnnnnnnnnnnnnnnnnnnnnnnnnnnnnnnnnnnnnnnnnnnnnnnnnnnnnnnnnnnnnnnnnnnnnnnnnnnnnnnnnnnnnnnnnnnnnnnnnnnnnnnnnnnnnnnnnnnnnnnnnnnnnnnnnnnnnnnnnnnnnnnnnnnnnnnnnnnnnnnnnnnnnnnnnnnnnnnnnnnnnnnnnnnnnnnnnnnnnnnnnnnnnnnnnnnnnnnnnnnnnnnnnnnnnnnnnnnnnnnnnnnnnnnnnnnnnnnnnnnnnnnnnnnnnnnnnnnnnnnnnnnnnnnnnnnnnnnnnnnnnnnnnnnnnnnnnnnnnnnnnnnnnnnnnnnnnnnnnnnnnnnnnnnnnnnnnnnnnnnnnnnnnnnnnnnnnnnnnnnnnnnnnnnnnnnnnnnnnnnnnnnnnnnnnnnnnnnnnnnnnnnnnnnnnnnnnnnnnnnnnnnnnnnnnnnnnnnnnnnnnnnnnnnnnnnnnnnnnnnnnnnnnnnnnnnnnnnnnnnnnnnnnnnnnnnnnnnnnnnnnnnnnnnnnnnnnnnnnnnnnnnnnnnnnnnnnnnnnnnnnnnnnnnnnnnnnnnnnnnnnnnnnnnnnnnnnnnnnnnnnnnnnnnnnnnnnnnnnnnnnnnnnnnnnnnnnnnnnnnnnnnnnnnnnnnnnnnnnnnnnnnnnnnnnnnnnnnnnnnnnnnnnnnnnnnnnnnnnnnnnnnnnnnnnnnnnnnnnnnnnnnnnnnnnnnnnnnnnnnnnnnnnnnnnnnnnnnnnnnnnnnnnnnnnnnnnnnnnnnnnnnnnnnnnnnnnnnnnnnnnnnnnnnnnnnnnnnnnnnnnnnnnnnnnnnnnnnnnnnnnnnnnnnnnnnnnnnnnnnnnnnnnnnnnnnnnnnnnnnnnnnnnnnnnnnnnnnnnnnnnnnnnnnnnnnnnnnnnnnnnnnnnnnnnnnnnnnnnnnnnnnnnnnnnnnnnnnnnnnnnnnnnnnnnnnnnnnnnnnnnnnnnnnnnnnnnnnnnnnnnnnnnnnnnnnnnnnnnnnnnnnnnnnnnnnnnnnnnnnnnnnnnnnnnnnnnnnnnnnnnnnnnnnnnnnnnnnnnnnnnnnnnnnnnnnnnnnnnnnnnnnnnnnnnnnnnnnnnnnnnnnnnnnnnnnnnnnnnnnnnnnnnnnnnnnnnnnnnnnnnnnnnnnnnnnnnnnnnnnnnnnnnnnnnnnnnnnnnnnnnnnnnnnnnnnnnnnnnnnnnnnnnnnnnnnnnnnnnnnnnnnnnnnnnnnnnnnnnnnnnnnnnnnnnnnnnnnnnnnnnnnnnnnnnnnnnnnnnnnnnnnnnnnnnnnnnnnnnnnnnnnnnnnnnnnnnnnnnnnnnnnnnnnnnnnnnnnnnnnnnnnnnnnnnnnnnnnnnnnnnnnnnnnnnnnnnnnnnnnnnnnnnnnnnnnnnnnnnnnnnnnnnnnnnnnnnnnnnnnnnnnnnnnnnnnnnnnnnnnnnnnnnnnnnnnnnnnnnnnnnnnnnnnnnnnnnnnnnnnnnnnnnnnnnnnnnnnnnnnnnnnnnnnnnnnnnnnnnnnnnnnnnnnnnnnnnnnnnnnnnnnnnnnnnnnnnnnnnnnnnnnnnnnnnnnnnnnnnnnnnnnnnnnnnnnnnnnnnnnnnnnnnnnnnnnnnnnnnnnnnnnnnnnnnnnnnnnnnnnnnnnnnnnnnnnnnnnnnnnnnnnnnnnnnnnnnnnnnnnnnnnnnnnnnnnnnnnnnnnnnnnnnnnnnnnnnnnnnnnnnnnnnnnnnnnnnnnnnnnnnnnnnnnnnnnnnnnnnnnnnnnnnnnnnnnnnnnnnnnnnnnnnnnnnnnnnnnnnnnnnnnnnnnnnnnnnnnnnnnnnnnnnnnnnnnnnnnnnnnnnnnnnnnnnnnnnnnnnnnnnnnnnnnnnnnnnnnnnnnnnnnnnnnnnnnnnnnnnnnnnnnnnnnnnnnnnnnnnnnnnnnnnnnnnnnnnnnnnnnnnnnnnnnnnnnnnnnnnnnnnnnnnnnnnnnnnnnnnnnnnnnnnnnnnnnnnnnnnnnnnnnnnnnnnnnnnnnnnnnnnnnnnnnnnnnnnnnnnnnnnnnnnnnnnnnnnnnnnnnnnnnnnnnnnnnnnnnnnnnnnnnnnnnnnnnnnnnnnnnnnnnnnnnnnnnnnnnnnnnnnnnnnnnnnnnnnnnnnnnnnnnnnnnnnnnnnnnnnnnnnnnnnnnnnnnnnnnnnnnnnnnnnnnnnnnnnnnnnnnnnnnnnnnnnnnnnnnnnnnnnnnnnnnnnnnnnnnnnnnnnnnnnnnnnnnnnnnnnnnnnnnnnnnnnnnnnnnnnnnnnnnnnnnnnnnnnnnnnnnnnnnnnnnnnnnnnnnnnnnnnnnnnnnnnnnnnnnnnnnnnnnnnnnnnnnnnnnnnnnnnnnnnnnnnnnnnnnnnnnnnnnnnnnnnnnnnnnnnnnnnnnnnnnnnnnnnnnnnnnnnnnnnnnnnnnnnnnnnnnnnnnnnnnnnnnnnnnnnnnnnnnnnnnnnnnnnnnnnnnnnnnnnnnnnnnnnnnnnnnnnnnnnnnnnnnnnnnnnnnnnnnnnnnnnnnnnnnnnnnnnnnnnnnnnnnnnnnnnnnnnnnnnnnnnnnnnnnnnnnnnnnnnnnnnnnnnnnnnnnnnnnnnnnnnnnnnnnnnnnnnnnnnnnnnnnnnnnnnnnnnnnnnnnnnnnnnnnnnnnnnnnnnnnnnnnnnnnnnnnnnnnnnnnnnnnnnnnnnnnnnnnnnnnnnnnnnnnnnnnnnnnnnnnnnnnnnnnnnnnnnnnnnnnnnnnnnnnnnnnnnnnnnnnnnnnnnnnnnnnnnnnnnnnnnnnnnnnnnnnnnnnnnnnnnnnnnnnnnnnnnnnnnnnnnnnnnnnnnnnnnnnnnnnnnnnnnnnnnnnnnnnnnnnnnnnnnnnnnnnnnnnnnnnnnnnnnnnnnnnnnnnnnnnnnnnnnnnnnnnnnnnnnnnnnnnnnnnnnnnnnnnnnnnnnnnnnnnnnnnnnnnnnnnnnnnnnnnnnnnnnnnnnnnnnnnnnnnnnnnnnnnnnnnnnnnnnnnnnnnnnnnnnnnnnnnnnnnnnnnnnnnnnnnnnnnnnnnnnnnnnnnnnnnnnnnnnnnnnnnnnnnnnnnnnnnnnnnnnnnnnnnnnnnnnnnnnnnnnnnnnnnnnnnnnnnnnnnnnnnnnnnnnnnnnnnnnnnnnnnnnnnnnnnnnnnnnnnnnnnnnnnnnnnnnnnnnnnnnnnnnnnnnnnnnnnnnnnnnnnnnnnnnnnnnnnnnnnnnnnnnnnnnnnnnnnnnnnnnnnnnnnnnnnnnnnnnnnnnnnnnnnnnnnnnnnnnnnnnnnnnnnnnnnnnnnnnnnnnnnnnnnnnnnnnnnnnnnnnnnnnnnnnnnnnnnnnnnnnnnnnnnnnnnnnnnnnnnnnnnnnnnnnnnnnnnnnnnnnnnnnnnnnnnnnnnnnnnnnnnnnnnnnnnnnnnnnnnnnnnnnnnnnnnnnnnnnnnnnnnnnnnnnnnnnnnnnnnnnnnnnnnnnnnnnnnnnnnnnnnnnnnnnnnnnnnnnnnnnnnnnnnnnnnnnnnnnnnnnnnnnnnnnnnnnnnnnnnnnnnnnnnnnnnnnnnnnnnnnnnnnnnnnnnnnnnnnnnnnnnnnnnnnnnnnnnnnnnnnnnnnnnnnnnnnnnnnnnnnnnnnnnnnnnnnnnnnnnnnnnnnnnnnnnnnnnnnnnnnnnnnnnnnnnnnnnnnnnnnnnnnnnnnnnnnnnnnnnnnnnnnnnnnnnnnnnnnnnnnnnnnnnnnnnnnnnnnnnnnnnnnnnnnnnnnnnnnnnnnnnnnnnnnnnnnnnnnnnnnnnnnnnnnnnnnnnnnnnnnnnnnnnnnnnnnnnnnnnnnnnnnnnnnnnnnnnnnnnnnnnnnnnnnnnnnnnnnnnnnnnnnnnnnnnnnnnnnnnnnnnnnnnnnnnnnnnnnnnnnnnnnnnnnnnnnnnnnnnnnnnnnnnnnnnnnnnnnnnnnnnnnnnnnnnnnnnnnnnnnnnnnnnnnnnnnnnnnnnnnnnnnnnnnnnnnnnnnnnnnnnnnnnnnnnnnnnnnnnnnnnnnnnnnnnnnnnnnnnnnnnnnnnnnnnnnnnnnnnnnnnnnnnnnnnnnnnnnnnnnnnnnnnnnnnnnnnnnnnnnnnnnnnnnnnnnnnnnnnnnnnnnnnnnnnnnnnnnnnnnnnnnnnnnnnnnnnnnnnnnnnnnnnnnnnnnnnnnnnnnnnnnnnnnnnnnnnnnnnnnnnnnnnnnnnnnnnnnnnnnnnnnnnnnnnnnnnnnnnnnnnnnnnnnnnnnnnnnnnnnnnnnnnnnnnnnnnnnnnnnnnnnnnnnnnnnnnnnnnnnnnnnnnnnnnnnnnnnnnnnnnnnnnnnnnnnnnnnnnnnnnnnnnnnnnnnnnnnnnnnnnnnnnnnnnnnnnnnnnnnnnnnnnnnnnnnnnnnnnnnnnnnnnnnnnnnnnnnnnnnnnnnnnnnnnnnnnnnnnnnnnnnnnnnnnnnnnnnnnnnnnnnnnnnnnnnnnnnnnnnnnnnnnnnnnnnnnnnnnnnnnnnnnnnnnnnnnnnnnnnnnnnnnnnnnnnnnnnnnnnnnnnnnnnnnnnnnnnnnnnnnnnnnnnnnnnnnnnnnnnnnnnnnnnnnnnnnnnnnnnnnnnnnnnnnnnnnnnnnnnnnnnnnnnnnnnnnnnnnnnnnnnnnnnnnnnnnnnnnnnnnnnnnnnnnnnnnnnnnnnnnnnnnnnnnnnnnnnnnnnnnnnnnnnnnnnnnnnnnnnnnnnnnnnnnnnnnnnnnnnnnnnnnnnnnnnnnnnnnnnnnnnnnnnnnnnnnnnnnnnnnnnnnnnnnnnnnnnnnnnnnnnnnnnnnnnnnnnnnnnnnnnnnnnnnnnnnnnnnnnnnnnnnnnnnnnnnnnnnnnnnnnnnnnnnnnnnnnnnnnnnnnnnnnnnnnnnnnnnnnnnnnnnnnnnnnnnnnnnnnnnnnnnnnnnnnnnnnnnnnnnnnnnnnnnnnnnnnnnnnnnnnnnnnnnnnnnnnnnnnnnnnnnnnnnnnnnnnnnnnnnnnnnnnnnnnnnnnnnnnnnnnnnnnnnnnnnnnnnnnnnnnnnnnnnnnnnnnnnnnnnnnnnnnnnnnnnnnnnnnnnnnnnnnnnnnnnnnnnnnnnnnnnnnnnnnnnnnnnnnnnnnnnnnnnnnnnnnnnnnnnnnnnnnnnnnnnnnnnnnnnnnnnnnnnnnnnnnnnnnnnnnnnnnnnnnnnnnnnnnnnnnnnnnnnnnnnnnnnnnnnnnnnnnnnnnnnnnnnnnnnnnnnnnnnnnnnnnnnnnnnnnnnnnnnnnnnnnnnnnnnnnnnnnnnnnnnnnnnnnnnnnnnnnnnnnnnnnnnnnnnnnnnnnnnnnnnnnnnnnnnnnnnnnnnnnnnnnnnnnnnnnnnnnnnnnnnnnnnnnnnnnnnnnnnnnnnnnnnnnnnnnnnnnnnnnnnnnnnnnnnnnnnnnnnnnnnnnnnnnnnnnnnnnnnnnnnnnnnnnnnnnnnnnnnnnnnnnnnnnnnnnnnnnnnnnnnnnnnnnnnnnnnnnnnnnnnnnnnnnnnnnnnnnnnnnnnnnnnnnnnnnnnnnnnnnnnnnnnnnnnnnnnnnnnnnnnnnnnnnnnnnnnnnnnnnnnnnnnnnnnnnnnnnnnnnnnnnnnnnnnnnnnnnnnnnnnnnnnnnnnnnnnnnnnnnnnnnnnnnnnnnnnnnnnnnnnnnnnnnnnnnnnnnnnnnnnnnnnnnnnnnnnnnnnnnnnnnnnnnnnnnnnnnnnnnnnnnnnnnnnnnnnnnnnnnnnnnnnnnnnnnnnnnnnnnnnnnnnnnnnnnnnnnnnnnnnnnnnnnnnnnnnnnnnnnnnnnnnnnnnnnnnnnnnnnnnnnnnnnnnnnnnnnnnnnnnnnnnnnnnnnnnnnnnnnnnnnnnnnnnnnnnnnnnnnnnnnnnnnnnnnnnnnnnnnnnnnnnnnnnnnnnnnnnnnnnnnnnnnnnnnnnnnnnnnnnnnnnnnnnnnnnnnnnnnnnnnnnnnnnnnnnnnnnnnnnnnnnnnnnnnnnnnnnnnnnnnnnnnnnnnnnnnnnnnnnnnnnnnnnnnnnnnnnnnnnnnnnnnnnnnnnnnnnnnnnnnnnnnnnnnnnnnnnnnnnnnnnnnnnnnnnnnnnnnnnnnnnnnnnnnnnnnnnnnnnnnnnnnnnnnnnnnnnnnnnnnnnnnnnnnnnnnnnnnnnnnnnnnnnnnnnnnnnnnnnnnnnnnnnnnnnnnnnnnnnnnnnnnnnnnnnnnnnnnnnnnnnnnnnnnnnnnnnnnnnnnnnnnnnnnnnnnnnnnnnnnnnnnnnnnnnnnnnnnnnnnnnnnnnnnnnnnnnnnnnnnnnnnnnnnnnnnnnnnnnnnnnnnnnnnnnnnnnnnnnnnnnnnnnnnnnnnnnnnnnnnnnnnnnnnnnnnnnnnnnnnnnnnnnnnnnnnnnnnnnnnnnnnnnnnnnnnnnnnnnnnnnnnnnnnnnnnnnnnnnnnnnnnnnnnnnnnnnnnnnnnnnnnnnnnnnnnnnnnnnnnnnnnnnnnnnnnnnnnnnnnnnnnnnnnnnnnnnnnnnnnnnnnnnnnnnnnnnnnnnnnnnnnnnnnnnnnnnnnnnnnnnnnnnnnnnnnnnnnnnnnnnnnnnnnnnnnnnnnnnnnnnnnnnnnnnnnnnnnnnnnnnnnnnnnnnnnnnnnnnnnnnnnnnnnnnnnnnnnnnnnnnnnnnnnnnnnnnnnnnnnnnnnnnnnnnnnnnnnnnnnnnnnnnnnnnnnnnnnnnnnnnnnnnnnnnnnnnnnnnnnnnnnnnnnnnnnnnnnnnnnnnnnnnnnnnnnnnnnnnnnnnnnnnnnnnnnnnnnnnnnnnnnnnnnnnnnnnnnnnnnnnnnnnnnnnnnnnnnnnnnnnnnnnnnnnnnnnnnnnnnnnnnnnnnnnnnnnnnnnnnnnnnnnnnnnnnnnnnnnnnnnnnnnnnnnnnnnnnnnnnnnnnnnnnnnnnnnnnnnnnnnnnnnnnnnnnnnnnnnnnnnnnnnnnnnnnnnnnnnnnnnnnnnnnnnnnnnnnnnnnnnnnnnnnnnnnnnnnnnnnnnnnnnnnnnnnnnnnnnnnnnnnnnnnnnnnnnnnnnnnnnnnnnnnnnnnnnnnnnnnnnnnnnnnnnnnnnnnnnnnnnnnnnnnnnnnnnnnnnnnnnnnnnnnnnnnnnnnnnnnnnnnnnnnnnnnnnnnnnnnnnnnnnnnnnnnnnnnnnnnnnnnnnnnnnnnnnnnnnnnnnnnnnnnnnnnnnnnnnnnnnnnnnnnnnnnnnnnnnnnnnnnnnnnnnnnnnnnnnnnnnnnnnnnnnnnnnnnnnnnnnnnnnnnnnnnnnnnnnnnnnnnnnnnnnnnnnnnnnnnnnnnnnnnnnnnnnnnnnnnnnnnnnnnnnnnnnnnnnnnnnnnnnnnnnnnnnnnnnnnnnnnnnnnnnnnnnnnnnnnnnnnnnnnnnnnnnnnnnnnnnnnnnnnnnnnnnnnnnnnnnnnnnnnnnnnnnnnnnnnnnnnnnnnnnnnnnnnnnnnnnnnnnnnnnnnnnnnnnnnnnnnnnnnnnnnnnnnnnnnnnnnnnnnnnnnnnnnnnnnnnnnnnnnnnnnnnnnnnnnnnnnnnnnnnnnnnnnnnnnnnnnnnnnnnnnnnnnnnnnnnnnnnnnnnnnnnnnnnnnnnnnnnnnnnnnnnnnnnnnnnnnnnnnnnnnnnnnnnnnnnnnnnnnnnnnnnnnnnnnnnnnnnnnnnnnnnnnnnnnnnnnnnnnnnnnnnnnnnnnnnnnnnnnnnnnnnnnnnnnnnnnnnnnnnnnnnnnnnnnnnnnnnnnnnnnnnnnnnnnnnnnnnnnnnnnnnnnnnnnnnnnnnnnnnnnnnnnnnnnnnnnnnnnnnnnnnnnnnnnnnnnnnnnnnnnnnnnnnnnnnnnnnnnnnnnnnnnnnnnnnnnnnnnnnnnnnnnnnnnnnnnnnnnnnnnnnnnnnnnnnnnnnnnnnnnnnnnnnnnnnnnnnnnnnnnnnnnnnnnnnnnnnnnnnnnnnnnnnnnnnnnnnnnnnnnnnnnnnnnnnnnnnnnnnnnnnnnnnnnnnnnnnnnnnnnnnnnnnnnnnnnnnnnnnnnnnnnnnnnnnnnnnnnnnnnnnnnnnnnnnnnnnnnnnnnnnnnnnnnnnnnnnnnnnnnnnnnnnnnnnnnnnnnnnnnnnnnnnnnnnnnnnnnnnnnnnnnnnnnnnnnnnnnnnnnnnnnnnnnnnnnnnnnnnnnnnnnnnnnnnnnnnnnnnnnnnnnnnnnnnnnnnnnnnnnnnnnnnnnnnnnnnnnnnnnnnnnnnnnnnnnnnnnnnnnnnnnnnnnnnnnnnnnnnnnnnnnnnnnnnnnnnnnnnnnnnnnnnnnnnnnnnnnnnnnnnnnnnnnnnnnnnnnnnnnnnnnnnnnnnnnnnnnnnnnnnnnnnnnnnnnnnnnnnnnnnnnnnnnnnnnnnnnnnnnnnnnnnnnnnnnnnnnnnnnnnnnnnnnnnnnnnnnnnnnnnnnnnnnnnnnnnnnnnnnnnnnnnnnnnnnnnnnnnnnnnnnnnnnnnnnnnnnnnnnnnnnnnnnnnnnnnnnnnnnnnnnnnnnnnnnnnnnnnnnnnnnnnnnnnnnnnnnnnnnnnnnnnnnnnnnnnnnnnnnnnnnnnnnnnnnnnnnnnnnnnnnnnnnnnnnnnnnnnnnnnnnnnnnnnnnnnnnnnnnnnnnnnnnnnnnnnnnnnnnnnnnnnnnnnnnnnnnnnnnnnnnnnnnnnnnnnnnnnnnnnnnnnnnnnnnnnnnnnnnnnnnnnnnnnnnnnnnnnnnnnnnnnnnnnnnnnnnnnnnnnnnnnnnnnnnnnnnnnnnnnnnnnnnnnnnnnnnnnnnnnnnnnnnnnnnnnnnnnnnnnnnnnnnnnnnnnnnnnnnnnnnnnnnnnnnnnnnnnnnnnnnnnnnnnnnnnnnnnnnnnnnnnnnnnnnnnnnnnnnnnnnnnnnnnnnnnnnnnnnnnnnnnnnnnnnnnnnnnnnnnnnnnnnnnnnnnnnnnnnnnnnnnnnnnnnnnnnnnnnnnnnnnnnnnnnnnnnnnnnnnnnnnnnnnnnnnnnnnnnnnnnnnnnnnnnnnnnnnnnnnnnnnnnnnnnnnnnnnnnnnnnnnnnnnnnnnnnnnnnnnnnnnnnnnnnnnnnnnnnnnnnnnnnnnnnnnnnnnnnnnnnnnnnnnnnnnnnnnnnnnnnnnnnnnnnnnnnnnnnnnnnnnnnnnnnnnnnnnnnnnnnnnnnnnnnnnnnnnnnnnnnnnnnnnnnnnnnnnnnnnnnnnnnnnnnnnnnnnnnnnnnnnnnnnnnnnnnnnnnnnnnnnnnnnnnnnnnnnnnnnnnnnnnnnnnnnnnnnnnnnnnnnnnnnnnnnnnnnnnnnnnnnnnnnnnnnnnnnnnnnnnnnnnnnnnnnnnnnnnnnnnnnnnnnnnnnnnnnnnnnnnnnnnnnnnnnnnnnnnnnnnnnnnnnnnnnnnnnnnnnnnnnnnnnnnnnnnnnnnnnnnnnnnnnnnnnnnnnnnnnnnnnnnnnnnnnnnnnnnnnnnnnnnnnnnnnnnnnnnnnnnnnnnnnnnnnnnnnnnnnnnnnnnnnnnnnnnnnnnnnnnnnnnnnnnnnnnnnnnnnnnnnnnnnnnnnnnnnnnnnnnnnnnnnnnnnnnnnnnnnnnnnnnnnnnnnnnnnnnnnnnnnnnnnnnnnnnnnnnnnnnnnnnnnnnnnnnnnnnnnnnnnnnnnnnnnnnnnnnnnnnnnnnnnnnnnnnnnnnnnnnnnnnnnnnnnnnnnnnnnnnnnnnnnnnnnnnnnnnnnnnnnnnnnnnnnnnnnnnnnnnnnnnnnnnnnnnnnnnnnnnnnnnnnnnnnnnnnnnnnnnnnnnnnnnnnnnnnnnnnnnnnnnnnnnnnnnnnnnnnnnnnnnnnnnnnnnnnnnnnnnnnnnnnnnnnnnnnnnnnnnnnnnnnnnnnnnnnnnnnnnnnnnnnnnnnnnnnnnnnnnnnnnnnnnnnnnnnnnnnnnnnnnnnnnnnnnnnnnnnnnnnnnnnnnnnnnnnnnnnnnnnnnnnnnnnnnnnnnnnnnnnnnnnnnnnnnnnnnnnnnnnnnnnnnnnnnnnnnnnnnnnnnnnnnnnnnnnnnnnnnnnnnnnnnnnnnnnnnnnnnnnnnnnnnnnnnnnnnnnnnnnnnnnnnnnnnnnnnnnnnnnnnnnnnnnnnnnnnnnnnnnnnnnnnnnnnnnnnnnnnnnnnnnnnnnnnnnnnnnnnnnnnnnnnnnnnnnnnnnnnnnnnnnnnnnnnnnnnnnnnnnnnnnnnnnnnnnnnnnnnnnnnnnnnnnnnnnnnnnnnnnnnnnnnnnnnnnnnnnnnnnnnnnnnnnnnnnnnnnnnnnnnnnnnnnnnnnnnnnnnnnnnnnnnnnnnnnnnnnnnnnnnnnnnnnnnnnnnnnnnnnnnnnnnnnnnnnnnnnnnnnnnnnnnnnnnnnnnnnnnnnnnnnnnnnnnnnnnnnnnnnnnnnnnnnnnnnnnnnnnnnnnnnnnnnnnnnnnnnnnnnnnnnnnnnnnnnnnnnnnnnnnnnnnnnnnnnnnnnnnnnnnnnnnnnnnnnnnnnnnnnnnnnnnnnnnnnnnnnnnnnnnnnnnnnnnnnnnnnnnnnnnnnnnnnnnnnnnnnnnnnnnnnnnnnnnnnnnnnnnnnnnnnnnnnnnnnnnnnnnnnnnnnnnnnnnnnnnnnnnnnnnnnnnnnnnnnnnnnnnnnnnnnnnnnnnnnnnnnnnnnnnnnnnnnnnnnnnnnnnnnnnnnnnnnnnnnnnnnnnnnnnnnnnnnnnnnnnnnnnnnnnnnnnnnnnnnnnnnnnnnnnnnnnnnnnnnnnnnnnnnnnnnnnnnnnnnnnnnnnnnnnnnnnnnnnnnnnnnnnnnnnnnnnnnnnnnnnnnnnnnnnnnnnnnnnnnnnnnnnnnnnnnnnnnnnnnnnnnnnnnnnnnnnnnnnnnnnnnnnnnnnnnnnnnnnnnnnnnnnnnnnnnnnnnnnnnnnnnnnnnnnnnnnnnnnnnnnnnnnnnnnnnnnnnnnnnnnnnnnnnnnnnnnnnnnnnnnnnnnnnnnnnnnnnnnnnnnnnnnnnnnnnnnnnnnnnnnnnnnnnnnnnnnnnnnnnnnnnnnnnnnnnnnnnnnnnnnnnnnnnnnnnnnnnnnnnnnnnnnnnnnnnnnnnnnnnnnnnnnnnnnnnnnnnnnnnnnnnnnnnnnnnnnnnnnnnnnnnnnnnnnnnnnnnnnnnnnnnnnnnnnnnnnnnnnnnnnnnnnnnnnnnnnnnnnnnnnnnnnnnnnnnnnnnnnnnnnnnnnnnnnnnnnnnnnnnnnnnnnnnnnnnnnnnnnnnnnnnnnnnnnnnnnnnnnnnnnnnnnnnnnnnnnnnnnnnnnnnnnnnnnnnnnnnnnnnnnnnnnnnnnnnnnnnnnnnnnnnnnnnnnnnnnnnnnnnnnnnnnnnnnnnnnnnnnnnnnnnnnnnnnnnnnnnnnnnnnnnnnnnnnnnnnnnnnnnnnnnnnnnnnnnnnnnnnnnnnnnnnnnnnnnnnnnnnnnnnnnnnnnnnnnnnnnnnnnnnnnnnnnnnnnnnnnnnnnnnnnnnnnnnnnnnnnnnnnnnnnnnnnnnnnnnnnnnnnnnnnnnnnnnnnnnnnnnnnnnnnnnnnnnnnnnnnnnnnnnnnnnnnnnnnnnnnnnnnnnnnnnnnnnnnnnnnnnnnnnnnnnnnnnnnnnnnnnnnnnnnnnnnnnnnnnnnnnnnnnnnnnnnnnnnnnnnnnnnnnnnnnnnnnnnnnnnnnnnnnnnnnnnnnnnnnnnnnnnnnnnnnnnnnnnnnnnnnnnnnnnnnnnnnnnnnnnnnnnnnnnnnnnnnnnnnnnnnnnnnnnnnnnnnnnnnnnnnnnnnnnnnnnnnnnnnnnnnnnnnnnnnnnnnnnnnnnnnnnnnnnnnnnnnnnnnnnnnnnnnnnnnnnnnnnnnnnnnnnnnnnnnnnnnnnnnnnnnnnnnnnnnnnnnnnnnnnnnnnnnnnnnnnnnnnnnnnnnnnnnnnnnnnnnnnnnnnnnnnnnnnnnnnnnnnnnnnnnnnnnnnnnnnnnnnnnnnnnnnnnnnnnnnnnnnnnnnnnnnnnnnnnnnnnnnnnnnnnnnnnnnnnnnnnnnnnnnnnnnnnnnnnnnnnnnnnnnnnnnnnnnnnnnnnnnnnnnnnnnnnnnnnnnnnnnnnnnnnnnnnnnnnnnnnnnnnnnnnnnnnnnnnnnnnnnnnnnnnnnnnnnnnnnnnnnnnnnnnnnnnnnnnnnnnnnnnnnnnnnnnnnnnnnnnnnnnnnnnnnnnnnnnnnnnnnnnnnnnnnnnnnnnnnnnnnnnnnnnnnnnnnnnnnnnnnnnnnnnnnnnnnnnnnnnnnnnnnnnnnnnnnnnnnnnnnnnnnnnnnnnnnnnnnnnnnnnnnnnnnnnnnnnnnnnnnnnnnnnnnnnnnnnnnnnnnnnnnnnnnnnnnnnnnnnnnnnnnnnnnnnnnnnnnnnnnnnnnnnnnnnnnnnnnnnnnnnnnnnnnnnnnnnnnnnnnnnnnnnnnnnnnnnnnnnnnnnnnnnnnnnnnnnnnnnnnnnnnnnnnnnnnnnnnnnnnnnnnnnnnnnnnnnnnnnnnnnnnnnnnnnnnnnnnnnnnnnnnnnnnnnnnnnnnnnnnnnnnnnnnnnnnnnnnnnnnnnnnnnnnnnnnnnnnnnnnnnnnnnnnnnnnnnnnnnnnnnnnnnnnnnnnnnnnnnnnnnnnnnnnnnnnnnnnnnnnnnnnnnnnnnnnnnnnnnnnnnnnnnnnnnnnnnnnnnnnnnnnnnnnnnnnnnnnnnnnnnnnnnnnnnnnnnnnnnnnnnnnnnnnnnnnnnnnnnnnnnnnnnnnnnnnnnnnnnnnnnnnnnnnnnnnnnnnnnnnnnnnnnnnnnnnnnnnnnnnnnnnnnnnnnnnnnnnnnnnnnnnnnnnnnnnnnnnnnnnnnnnnnnnnnnnnnnnnnnnnnnnnnnnnnnnnnnnnnnnnnnnnnnnnnnnnnnnnnnnnnnnnnnnnnnnnnnnnnnnnnnnnnnnnnnnnnnnnnnnnnnnnnnnnnnnnnnnnnnnnnnnnnnnnnnnnnnnnnnnnnnnnnnnnnnnnnnnnnnnnnnnnnnnnnnnnnnnnnnnnnnnnnnnnnnnnnnnnnnnnnnnnnnnnnnnnnnnnnnnnnnnnnnnnnnnnnnnnnnnnnnnnnnnnnnnnnnnnnnnnnnnnnnnnnnnnnnnnnnnnnnnnnnnnnnnnnnnnnnnnnnnnnnnnnnnnnnnnnnnnnnnnnnnnnnnnnnnnnnnnnnnnnnnnnnnnnnnnnnnnnnnnnnnnnnnnnnnnnnnnnnnnnnnnnnnnnnnnnnnnnnnnnnnnnnnnnnnnnnnnnnnnnnnnnnnnnnnnnnnnnnnnnnnnnnnnnnnnnnnnnnnnnnnnnnnnnnnnnnnnnnnnnnnnnnnnnnnnnnnnnnnnnnnnnnnnnnnnnnnnnnnnnnnnnnnnnnnnnnnnnnnnnnnnnnnnnnnnnnnnnnnnnnnnnnnnnnnnnnnnnnnnnnnnnnnnnnnnnnnnnnnnnnnnnnnnnnnnnnnnnnnnnnnnnnnnnnnnnnnnnnnnnnnnnnnnnnnnnnnnnnnnnnnnnnnnnnnnnnnnnnnnnnnnnnnnnnnnnnnnnnnnnnnnnnnnnnnnnnnnnnnnnnnnnnnnnnnnnnnnnnnnnnnnnnnnnnnnnnnnnnnnnnnnnnnnnnnnnnnnnnnnnnnnnnnnnnnnnnnnnnnnnnnnnnnnnnnnnnnnnnnnnnnnnnnnnnnnnnnnnnnnnnnnnnnnnnnnnnnnnnnnnnnnnnnnnnnnnnnnnnnnnnnnnnnnnnnnnnnnnnnnnnnnnnnnnnnnnnnnnnnnnnnnnnnnnnnnnnnnnnnnnnnnnnnnnnnnnnnnnnnnnnnnnnnnnnnnnnnnnnnnnnnnnnnnnnnnnnnnnnnnnnnnnnnnnnnnnnnnnnnnnnnnnnnnnnnnnnnnnnnnnnnnnnnnnnnnnnnnnnnnnnnnnnnnnnnnnnnnnnnnnnnnnnnnnnnnnnnnnnnnnnnnnnnnnnnnnnnnnnnnnnnnnnnnnnnnnnnnnnnnnnnnnnnnnnnnnnnnnnnnnnnnnnnnnnnnnnnnnnnnnnnnnnnnnnnnnnnnnnnnnnnnnnnnnnnnnnnnnnnnnnnnnnnnnnnnnnnnnnnnnnnnnnnnnnnnnnnnnnnnnnnnnnnnnnnnnnnnnnnnnnnnnnnnnnnnnnnnnnnnnnnnnnnnnnnnnnnnnnnnnnnnnnnnnnnnnnnnnnnnnnnnnnnnnnnnnnnnnnnnnnnnnnnnnnnnnnnnnnnnnnnnnnnnnnnnnnnnnnnnnnnnnnnnnnnnnnnnnnnnnnnnnnnnnnnnnnnnnnnnnnnnnnnnnnnnnnnnnnnnnnnnnnnnnnnnnnnnnnnnnnnnnnnnnnnnnnnnnnnnnnnnnnnnnnnnnnnnnnnnnnnnnnnnnnnnnnnnnnnnnnnnnnnnnnnnnnnnnnnnnnnnnnnnnnnnnnnnnnnnnnnnnnnnnnnnnnnnnnnnnnnnnnnnnnnnnnnnnnnnnnnnnnnnnnnnnnnnnnnnnnnnnnnnnnnnnnnnnnnnnnnnnnnnnnnnnnnnnnnnnnnnnnnnnnnnnnnnnnnnnnnnnnnnnnnnnnnnnnnnnnnnnnnnnnnnnnnnnnnnnnnnnnnnnnnnnnnnnnnnnnnnnnnnnnnnnnnnnnnnnnnnnnnnnnnnnnnnnnnnnnnnnnnnnnnnnnnnnnnnnnnnnnnnnnnnnnnnnnnnnnnnnnnnnnnnnnnnnnnnnnnnnnnnnnnnnnnnnnnnnnnnnnnnnnnnnnnnnnnnnnnnnnnnnnnnnnnnnnnnnnnnnnnnnnnnnnnnnnnnnnnnnnnnnnnnnnnnnnnnnnnnnnnnnnnnnnnnnnnnnnnnnnnnnnnnnnnnnnnnnnnnnnnnnnnnnnnnnnnnnnnnnnnnnnnnnnnnnnnnnnnnnnnnnnnnnnnnnnnnnnnnnnnnnnnnnnnnnnnnnnnnnnnnnnnnnnnnnnnnnnnnnnnnnnnnnnnnnnnnnnnnnnnnnnnnnnnnnnnnnnnnnnnnnnnnnnnnnnnnnnnnnnnnnnnnnnnnnnnnnnnnnnnnnnnnnnnnnnnnnnnnnnnnnnnnnnnnnnnnnnnnnnnnnnnnnnnnnnnnnnnnnnnnnnnnnnnnnnnnnnnnnnnnnnnnnnnnnnnnnnnnnnnnnnnnnnnnnnnnnnnnnnnnnnnnnnnnnnnnnnnnnnnnnnnnnnnnnnnnnnnnnnnnnnnnnnnnnnnnnnnnnnnnnnnnnnnnnnnnnnnnnnnnnnnnnnnnnnnnnnnnnnnnnnnnnnnnnnnnnnnnnnnnnnnnnnnnnnnnnnnnnnnnnnnnnnnnnnnnnnnnnnnnnnnnnnnnnnnnnnnnnnnnnnnnnnnnnnnnnnnnnnnnnnnnnnnnnnnnnnnnnnnnnnnnnnnnnnnnnnnnnnnnnnnnnnnnnnnnnnnnnnnnnnnnnnnnnnnnnnnnnnnnnnnnnnnnnnnnnnnnnnnnnnnnnnnnnnnnnnnnnnnnnnnnnnnnnnnnnnnnnnnnnnnnnnnnnnnnnnnnnnnnnnnnnnnnnnnnnnnnnnnnnnnnnnnnnnnnnnnnnnnnnnnnnnnnnnnnnnnnnnnnnnnnnnnnnnnnnnnnnnnnnnnnnnnnnnnnnnnnnnnnnnnnnnnnnnnnnnnnnnnnnnnnnnnnnnnnnnnnnnnnnnnnnnnnnnnnnnnnnnnnnnnnnnnnnnnnnnnnnnnnnnnnnnnnnnnnnnnnnnnnnnnnnnnnnnnnnnnnnnnnnnnnnnnnnnnnnnnnnnnnnnnnnnnnnnnnnnnnnnnnnnnnnnnnnnnnnnnnnnnnnnnnnnnnnnnnnnnnnnnnnnnnnnnnnnnnnnnnnnnnnnnnnnnnnnnnnnnnnnnnnnnnnnnnnnnnnnnnnnnnnnnnnnnnnnnnnnnnnnnnnnnnnnnnnnnnnnnnnnnnnnnnnnnnnnnnnnnnnnnnnnnnnnnnnnnnnnnnnnnnnnnnnnnnnnnnnnnnnnnnnnnnnnnnnnnnnnnnnnnnnnnnnnnnnnnnnnnnnnnnnnnnnnnnnnnnnnnnnnnnnnnnnnnnnnnnnnnnnnnnnnnnnnnnnnnnnnnnnnnnnnnnnnnnnnnnnnnnnnnnnnnnnnnnnnnnnnnnnnnnnnnnnnnnnnnnnnnnnnnnnnnnnnnnnnnnnnnnnnnnnnnnnnnnnnnnnnnnnnnnnnnnnnnnnnnnnnnnnnnnnnnnnnnnnnnnnnnnnnnnnnnnnnnnnnnnnnnnnnnnnnnnnnnnnnnnnnnnnnnnnnnnnnnnnnnnnnnnnnnnnnnnnnnnnnnnnnnnnnnnnnnnnnnnnnnnnnnnnnnnnnnnnnnnnnnnnnnnnnnnnnnnnnnnnnnnnnnnnnnnnnnnnnnnnnnnnnnnnnnnnnnnnnnnnnnnnnnnnnnnnnnnnnnnnnnnnnnnnnnnnnnnnnnnnnnnnnnnnnnnnnnnnnnnnnnnnnnnnnnnnnnnnnnnnnnnnnnnnnnnnnnnnnnnnnnnnnnnnnnnnnnnnnnnnnnnnnnnnnnnnnnnnnnnnnnnnnnnnnnnnnnnnnnnnnnnnnnnnnnnnnnnnnnnnnnnnnnnnnnnnnnnnnnnnnnnnnnnnnnnnnnnnnnnnnnnnnnnnnnnnnnnnnnnnnnnnnnnnnnnnnnnnnnnnnnnnnnnnnnnnnnnnnnnnnnnnnnnnnnnnnnnnnnnnnnnnnnnnnnnnnnnnnnnnnnnnnnnnnnnnnnnnnnnnnnnnnnnnnnnnnnnnnnnnnnnnnnnnnnnnnnnnnnnnnnnnnnnnnnnnnnnnnnnnnnnnnnnnnnnnnnnnnnnnnnnnnnnnnnnnnnnnnnnnnnnnnnnnnnnnnnnnnnnnnnnnnnnnnnnnnnnnnnnnnnnnnnnnnnnnnnnnnnnnnnnnnnnnnnnnnnnnnnnnnnnnnnnnnnnnnnnnnnnnnnnnnnnnnnnnnnnnnnnnnnnnnnnnnnnnnnnnnnnnnnnnnnnnnnnnnnnnnnnnnnnnnnnnnnnnnnnnnnnnnnnnnnnnnnnnnnnnnnnnnnnnnnnnnnnnnnnnnnnnnnnnnnnnnnnnnnnnnnnnnnnnnnnnnnnnnnnnnnnnnnnnnnnnnnnnnnnnnnnnnnnnnnnnnnnnnnnnnnnnnnnnnnnnnnnnnnnnnnnnnnnnnnnnnnnnnnnnnnnnnnnnnnnnnnnnnnnnnnnnnnnnnnnnnnnnnnnnnnnnnnnnnnnnnnnnnnnnnnnnnnnnnnnnnnnnnnnnnnnnnnnnnnnnnnnnnnnnnnnnnnnnnnnnnnnnnnnnnnnnnnnnnnnnnnnnnnnnnnnnnnnnnnnnnnnnnnnnnnnnnnnnnnnnnnnnnnnnnnnnnnnnnnnnnnnnnnnnnnnnnnnnnnnnnnnnnnnnnnnnnnnnnnnnnnnnnnnnnnnnnnnnnnnnnnnnnnnnnnnnnnnnnnnnnnnnnnnnnnnnnnnnnnnnnnnnnnnnnnnnnnnnnnnnnnnnnnnnnnnnnnnnnnnnnnnnnnnnnnnnnnnnnnnnnnnnnnnnnnnnnnnnnnnnnnnnnnnnnnnnnnnnnnnnnnnnnnnnnnnnnnnnnnnnnnnnnnnnnnnnnnnnnnnnnnnnnnnnnnnnnnnnnnnnnnnnnnnnnnnnnnnnnnnnnnnnnnnnnnnnnnnnnnnnnnnnnnnnnnnnnnnnnnnnnnnnnnnnnnnnnnnnnnnnnnnnnnnnnnnnnnnnnnnnnnnnnnnnnnnnnnnnnnnnnnnnnnnnnnnnnnnnnnnnnnnnnnnnnnnnnnnnnnnnnnnnnnnnnnnnnnnnnnnnnnnnnnnnnnnnnnnnnnnnnnnnnnnnnnnnnnnnnnnnnnnnnnnnnnnnnnnnnnnnnnnnnnnnnnnnnnnnnnnnnnnnnnnnnnnnnnnnnnnnnnnnnnnnnnnnnnnnnnnnnnnnnnnnnnnnnnnnnnnnnnnnnnnnnnnnnnnnnnnnnnnnnnnnnnnnnnnnnnnnnnnnnnnnnnnnnnnnnnnnnnnnnnnnnnnnnnnnnnnnnnnnnnnnnnnnnnnnnnnnnnnnnnnnnnnnnnnnnnnnnnnnnnnnnnnnnnnnnnnnnnnnnnnnnnnnnnnnnnnnnnnnnnnnnnnnnnnnnnnnnnnnnnnnnnnnnnnnnnnnnnnnnnnnnnnnnnnnnnnnnnnnnnnnnnnnnnnnnnnnnnnnnnnnnnnnnnnnnnnnnnnnnnnnnnnnnnnnnnnnnnnnnnnnnnnnnnnnnnnnnnnnnnnnnnnnnnnnnnnnnnnnnnnnnnnnnnnnnnnnnnnnnnnnnnnnnnnnnnnnnnnnnnnnnnnnnnnnnnnnnnnnnnnnnnnnnnnnnnnnnnnnnnnnnnnnnnnnnnnnnnnnnnnnnnnnnnnnnnnnnnnnnnnnnnnnnnnnnnnnnnnnnnnnnnnnnnnnnnnnnnnnnnnnnnnnnnnnnnnnnnnnnnnnnnnnnnnnnnnnnnnnnnnnnnnnnnnnnnnnnnnnnnnnnnnnnnnnnnnnnnnnnnnnnnnnnnnnnnnnnnnnnnnnnnnnnnnnnnnnnnnnnnnnnnnnnnnnnnnnnnnnnnnnnnnnnnnnnnnnnnnnnnnnnnnnnnnnnnnnnnnnnnnnnnnnnnnnnnnnnnnnnnnnnnnnnnnnnnnnnnnnnnnnnnnnnnnnnnnnnnnnnnnnnnnnnnnnnnnnnnnnnnnnnnnnnnnnnnnnnnnnnnnnnnnnnnnnnnnnnnnnnnnnnnnnnnnnnnnnnnnnnnnnnnnnnnnnnnnnnnnnnnnnnnnnnnnnnnnnnnnnnnnnnnnnnnnnnnnnnnnnnnnnnnnnnnnnnnnnnnnnnnnnnnnnnnnnnnnnnnnnnnnnnnnnnnnnnnnnnnnnnnnnnnnnnnnnnnnnnnnnnnnnnnnnnnnnnnnnnnnnnnnnnnnnnnnnnnnnnnnnnnnnnnnnnnnnnnnnnnnnnnnnnnnnnnnnnnnnnnnnnnnnnnnnnnnnnnnnnnnnnnnnnnnnnnnnnnnnnnnnnnnnnnnnnnnnnnnnnnnnnnnnnnnnnnnnnnnnnnnnnnnnnnnnnnnnnnnnnnnnnnnnnnnnnnnnnnnnnnnnnnnnnnnnnnnnnnnnnnnnnnnnnnnnnnnnnnnnnnnnnnnnnnnnnnnnnnnnnnnnnnnnnnnnnnnnnnnnnnnnnnnnnnnnnnnnnnnnnnnnnnnnnnnnnnnnnnnnnnnnnnnnnnnnnnnnnnnnnnnnnnnnnnnnnnnnnnnnnnnnnnnnnnnnnnnnnnnnnnnnnnnnnnnnnnnnnnnnnnnnnnnnnnnnnnnnnnnnnnnnnnnnnnnnnnnnnnnnnnnnnnnnnnnnnnnnnnnnnnnnnnnnnnnnnnnnnnnnnnnnnnnnnnnnnnnnnnnnnnnnnnnnnnnnnnnnnnnnnnnnnnnnnnnnnnnnnnnnnnnnnnnnnnnnnnnnnnnnnnnnnnnnnnnnnnnnnnnnnnnnnnnnnnnnnnnnnnnnnnnnnnnnnnnnnnnnnnnnnnnnnnnnnnnnnnnnnnnnnnnnnnnnnnnnnnnnnnnnnnnnnnnnnnnnnnnnnnnnnnnnnnnnnnnnnnnnnnnnnnnnnnnnnnnnnnnnnnnnnnnnnnnnnnnnnnnnnnnnnnnnnnnnnnnnnnnnnnnnnnnnnnnnnnnnnnnnnnnnnnnnnnnnnnnnnnnnnnnnnnnnnnnnnnnnnnnnnnnnnnnnnnnnnnnnnnnnnnnnnnnnnnnnnnnnnnnnnnnnnnnnnnnnnnnnnnnnnnnnnnnnnnnnnnnnnnnnnnnnnnnnnnnnnnnnnnnnnnnnnnnnnnnnnnnnnnnnnnnnnnnnnnnnnnnnnnnnnnnnnnnnnnnnnnnnnnnnnnnnnnnnnnnnnnnnnnnnnnnnnnnnnnnnnnnnnnnnnnnnnnnnnnnnnnnnnnnnnnnnnnnnnnnnnnnnnnnnnnnnnnnnnnnnnnnnnnnnnnnnnnnnnnnnnnnnnnnnnnnnnnnnnnnnnnnnnnnnnnnnnnnnnnnnnnnnnnnnnnnnnnnnnnnnnnnnnnnnnnnnnnnnnnnnnnnnnnnnnnnnnnnnnnnnnnnnnnnnnnnnnnnnnnnnnnnnnnnnnnnnnnnnnnnnnnnnnnnnnnnnnnnnnnnnnnnnnnnnnnnnnnnnnnnnnnnnnnnnnnnnnnnnnnnnnnnnnnnnnnnnnnnnnnnnnnnnnnnnnnnnnnnnnnnnnnnnnnnnnnnnnnnnnnnnnnnnnnnnnnnnnnnnnnnnnnnnnnnnnnnnnnnnnnnnnnnnnnnnnnnnnnnnnnnnnnnnnnnnnnnnnnnnnnnnnnnnnnnnnnnnnnnnnnnnnnnnnnnnnnnnnnnnnnnnnnnnnnnnnnnnnnnnnnnnnnnnnnnnnnnnnnnnnnnnnnnnnnnnnnnnnnnnnnnnnnnnnnnnnnnnnnnnnnnnnnnnnnnnnnnnnnnnnnnnnnnnnnnnnnnnnnnnnnnnnnnnnnnnnnnnnnnnnnnnnnnnnnnnnnnnnnnnnnnnnnnnnnnnnnnnnnnnnnnnnnnnnnnnnnnnnnnnnnnnnnnnnnnnnnnnnnnnnnnnnnnnnnnnnnnnnnnnnnnnnnnnnnnnnnnnnnnnnnnnnnnnnnnnnnnnnnnnnnnnnnnnnnnnnnnnnnnnnnnnnnnnnnnnnnnnnnnnnnnnnnnnnnnnnnnnnnnnnnnnnnnnnnnnnnnnnnnnnnnnnnnnnnnnnnnnnnnnnnnnnnnnnnnnnnnnnnnnnnnnnnnnnnnnnnnnnnnnnnnnnnnnnnnnnnnnnnnnnnnnnnnnnnnnnnnnnnnnnnnnnnnnnnnnnnnnnnnnnnnnnnnnnnnnnnnnnnnnnnnnnnnnnnnnnnnnnnnnnnnnnnnnnnnnnnnnnnnnnnnnnnnnnnnnnnnnnnnnnnnnnnnnnnnnnnnnnnnnnnnnnnnnnnnnnnnnnnnnnnnnnnnnnnnnnnnnnnnnnnnnnnnnnnnnnnnnnnnnnnnnnnnnnnnnnnnnnnnnnnnnnnnnnnnnnnnnnnnnnnnnnnnnnnnnnnnnnnnnnnnnnnnnnnnnnnnnnnnnnnnnnnnnnnnnnnnnnnnnnnnnnnnnnnnnnnnnnnnnnnnnnnnnnnnnnnnnnnnnnnnnnnnnnnnnnnnnnnnnnnnnnnnnnnnnnnnnnnnnnnnnnnnnnnnnnnnnnnnnnnnnnnnnnnnnnnnnnnnnnnnnnnnnnnnnnnnnnnnnnnnnnnnnnnnnnnnnnnnnnnnnnnnnnnnnnnnnnnnnnnnnnnnnnnnnnnnnnnnnnnnnnnnnnnnnnnnnnnnnnnnnnnnnnnnnnnnnnnnnnnnnnnnnnnnnnnnnnnnnnnnnnnnnnnnnnnnnnnnnnnnnnnnnnnnnnnnnnnnnnnnnnnnnnnnnnnnnnnnnnnnnnnnnnnnngacggtgaacgtctttccgaggtcgctgccgtagggcgtgccgcaccgctggccttcgcagacctgcaggccgatgtcggtcagaatcacaaagatgtcaccgtcccggcgataactcaaaaagagcttatagagcagctgctggaaattgaaccggccggtcagctcgcacggttgatcgagcatttcctctcgccagagggcttcggcctgtttgttccaggccttgctcttggtgcgggcctcgatgtgcgtctgggtgccgacgacctcgtcggcctccgagagcaacaggcccttgaccatcggattattgcgggcctggtcccggcagatctcgcgcatcatgcccagggccgactcggtcagatgcgcatccccggggccgcccagcccgctgcgctgggtgtggaggcgcgtgttcttgatggcgttataaccgaaccgggcagcggcgtcggccagcttggcccgggccaagtcctggcggcgcgaggcaaaccaccggggcgagacggccttggccaggccgtcgatcttcgagctgactcgatcgctaagcgtcatacgtgcgccacccttgtgcctttgtcgttacccttggcgatcttgcgcagtagccgctcctcgcggcggtacagcacacccagatcgtgcttggtgaacgactggttgcccacggtgtaggccgagacggtcccgcgctcgatggcggcgatcgccgtctggacccggtcgagttgtattgcatacgattctgccatattcgcagaatacagtggccgggcaggaggtgcacagagggccgttactacagattagtaacgactcgaaaagtttctaaagcccctaggatttcgggatttctcgatttgcagttcaatttccggcgtgtttctgccgataaacgtgatggaggcgggtcgaagaggcgtagtgcgaatgcccattgcaagtagtctggatcttggcgagcgactgttacggtgactagccggtaggggtgtttccctgaaattaccgagagtaacggactactcacggggacggagtgcgcccaccggcaagaagcagcgggcattcaggaacacaaaaggcgaggtgacaatgaattacaacctattggacgaaaagtggattccggtcctttatcgcaacgggaaatgggatcgcgttgggattcgtcaggcgttcaaggatgcgggctgcattcggcaaatcgcggcgagcaaccccatggatcgtgttgcgatcgtacgatttctgcttgcgctattgtattggtgtaaggggagtccaccagatgatgcgaacgcagaccttagtgattctcttccctctgactggttctcgaaactgcatgacaacagagataacttcaatctcttcggtgaagggaagaggttctaccaatgcgcttcctcgggaaatgtgaactcccctgcaagactcgcggcggactatcttatccatgagatccccacaggtacgaacaaatggcactttcgccatgcgaccgacaaggtcgatggcttgtgtccggggtgttgtgccatgggtctgttgaggctgccgctcttttcaacatctggaggccgtggcaagccgcctggggttaactcgaaaccgccggtttatgccgtaccggtgggtgtttcactcgcggagactctatggttctcgtggcagcaagcatcgagattgggaacaccagcgtgggaagagccggatttgcagctcccgacaataggtgaggttcctctgctcatgggattgacgtggttgccgcgacgggtgtggctgggcaatgccgaggagcccgaagccgcctgtatctcatgtggacgcaaggagcgactggttcgactcagcgtgtttgctggcatagggagcactaagacaactgaaggtcgtcccaggcgaatctggcgtgacccacacgttctctatgttgcttctccgaaaggcgaagtgatatcgcaccatgcaagtgatgcccttggtgccgccgatgcggcagccgatcaatgggcaaaaaccatgaccagaatgctccaatctagcgcgatcggcagtgaaagtgttcgtgtctgggtagtcggcttctccacagttcagaacgacaagtatctggaggctgcagagtacgaggtgtcgttccagtgttcaccaagtcgtgttcgggagagtattgagagaatggaacaatggcaaaaacaggggtatgggctaaagaggcggatagccaggtcgaaggtcgagggttcagccttcgtttcagtcattcgcccccatgtggaaaagagagtttccacaaaagccggtgatctaattgccgggggggatgaggtgtggcaacaggcggcggcggaataccacccgcttatgaagttgatcgccacgtcgctatctcccggtttcacgacggcagcggttcaacggcgactacacattaccagggtggctccggatatgcggcccaaaacaaaaacaatcaagaaggcgggccggaagaagggaggagccaagtgagcgcagcagagcagtacattgatactttgacaaagctcaaggtggggcaacttggattgctgcgcacccatgcgggacaggggctcgatgaatcagttgatggattcgacctctttgctggattgtggtggccgttgcgacgacagaagggcgggcctccacctcgccgtgaagtggcttggctggttgccaagctttacgccttttgtccgattccacattcacccggcagcacgattgctcgccaattgtgtcactgccagccagccaagagccccgaaagggaacgattccagcagaaattcgaccgtatggtcaccctgtcgcttgagcaactcgaaccggctcttcaatgggctctcaaccaagtcgcctcaaacagggaggggcttgattgggtgcagctcacggacgatctttcaaactggcaccgcgaaggcaaacgcctgtcgtgggcgagacaattcattccggacacggaaagggacccctcatgttgatccagatacatgctattcagaaccacagccccgccaatctcaatcgagatgacttgggagcacccaagacatgctatttcggcggcgttctgcgatcgcgtatctctagtcagtgcatcaaacgaagcatccgaactagtgaagcatttaagtctctgtgtggcgggattcgtacgcgacaattggcacggctcattgctgagaacatcaaaggcggagccagtgcgcagaagcgagcagccaagattctcaagaaatgtggcatcaatgccaaggatgacgaaaagagcgatatgcttgtttacacaacgggggaggcgattcagaggatggccgtatgcttgcaggacggtgacaagaagaccgatgacgaattggcagcagtgtttggaacgctcatcagtgaacaggtagccgtgccggacatggcgcttagcggcagaatgctcgaaaccggtgttctgaaagataccacggtcgacgcagcgttgcaggtggcccacgccatctcgacgcatgaggcccggcctgaagtggattactatgttgcgacggatgacattcccggggccgatgccggcgcgggttacgtggatgaagccatgtttgcctctgcctgtttctataagtactcttcgattcactgggagacactcgtcgacaatctcgatggcttcgacggcaatacggagtatctagcagcccatacggttggcgcattcatccgtggagcggcgaggaccaacccgacgggcaagcagaacagtttcgctgctcataacgctcccgatgggatgttgatagaaatcgggaacactcccatcagctacgccaacgcgttcgccaagccagcagtccaaggcgagcgtgacatgatcgcccagagcatcgcccagctcggtcaatatgttcgcgacctggacatgggatatggccctccgaagaaacgcttctggttttcgcccaatctccgctatcgcttgaccacgcaagttacagaagaggagaacggcaagaagaaacggagtgaggtctcgttgacgaatgatgagtactcattcaagtctctcaacgaactgatcgccgccgtgattaggagccttggtcatgattgggatgccgtccagacggttgtcgtgaatccagaggtagcctcatgagtacgaatactctcttcctgcgccttgaagggccgttacaagcgtggggcaatcaggagtcgaagttcgtcatccgacggacggccgaggctccgaccaaatctggactgatcgggatgctctgcgcggcattgggtgtttcccgtcccgatgccgccggcgagtggcttccaagactcggtggcctgcgcatgggggtacgcatcgacgcgccgggtctccgctggtgggactatcacaccgtcggtgccaagatgcagatgcgtacagccgaaggtaagcacaaagatggcccgattctcacccggcgtgagtacctgtgcgatgcttcatttctcgctgcacttcagggtgaaccgtcgctggttgtcgaactggcgcaagcgatgaagaacccgaaatggaccctctatctagggcgcaagtcctgtccgccgtcccgtctgttgatggagcatccgccgggccttttccccgatttgctttctgcgttgatatcgattccttggcggcgacggctcaaggctgacgagccacggcgtactgcggattgcctcctcgactggcaaccgtcggacgaacagcccgaagcgcccgacgatgcgcttatctggtacgatgtgccgttgacgtttgagccaccagcgcatcacccacgctttgttattcggcacaaactgcgcgtgggtccgggaggtgaggtctccatcgcaaaacaaggcacgcaaagccccactccaggaccgcttcgcccgcgcgctgactatggcaacaccaaatacaggaagatccgacaagagcggcttgaccgcgatcatcagttatgtgttttttgtaagtcgcctgcaaccacggttcagcatgtcacgtatcgccatgctggtggagaggaacgtattgaagagttgcggtccctttgccgcctttgccatgatgccgtgacgatgatcgaatacggcttgggcatgggcctggatcggatcaacccagaagagcagcgatggcgggatcggatcatccagaaacgagaggagatcatcaagtttcgctcgcttgaaacgcgtcggcgtaaactcagcgccgaggaggtcgaatgatgtacctgtcccaccttatgatcgatgttggaaacaatcctgatcgaccccggcctggacggcgatggttgcgaaatgcttaccgcgttcaccagcgactttgcatggcgtttccatcgaaggaacgcccaaagaaggaagccgacccggagtttctgatgccatattcacccgacgacttccctgaagcccggcacatcgcagaccagaaggcagcacaggttggttccgaagcactgcgtcatgtacacacaccgcgcgattccagcagcggtttcctgtttcgaatagaccccttgccagactcatcagtatcgattctggttctgtcggccgtcaaaccggattgggactatgcttttcataatgccgcttatctcttggcagcgcccccctccaagccgcgttccatggaactggccatcgcaacgggcagtcagtttcacttccgtctgacagccaatcccgtccggaaagttgcgaccattccaagaaggtgccgggaacggccggatcaaccgggtcgccacgggcgacgtgttccagtaccgtcggaagacttcggaaagtggctggtggcgcgcggtgagatacatggctttcggcttttcgaaccgcttgaggagactcttcgcactcagcccggatacgtttatgtcgccaagggccgcgacaccggtaaggggcagcggttacggagtgtgcgttacgatggtcttctcgaagttgtcgatgtggagcggtttcgcaaggcgttgctctcaggcatcgggagcgccaaggccttcggcttcggactgttatccatcgcgccggtgaatcgatgaccaagttgtgcggctacggcaaaggagagattgcactcatcgaataacgctctttggtgtccagtacgaagggattctggaagtgacggatacgcagaagttctttcggacgctctgctctggcattggcccggctaaaggactgggcatgggtctgctaagcattgcaccggcttaggagattcaatggctgacttgcatgaactgccgaagtttgaggatcgctggactcatctgtacttggagcatggcggtctggacaaggacaaagagggcctggtcttccggcaaggggaaggtcgcaccctgattccgatcgaccaactttcactggtcatgttgggacccggaacctctgtcactcagcaggccgccaaggcgctggccgcgaacaactgcctgatgtgcttcgtcggcgaacagggtgtgaagatgtatgcctttggaacgggagggacacacagcgcccgccgactgctgcgacaagcagaactgtatgcctctcctgaacagcgagagcgcgtcgcccggcggatgtatctgaaacggtttcctccaccaatcccggcagatgtgaccatacagcagctccggggcatggaaggagcccgagtgcgcaaaacgtacgagcagatggctcaagactggggagtgaagtgggaaggccgcaactacgatcaaaacagttggtacactgccgaccccttgaacagagcaatgtcttcggccaatgcctgcctttacagcttgtgtcacgccgccattctctctgccggttacagtcctgccatcggcttcattcatacaggcaaagtactgagcttcgtgtacgacgtggcggatctctacaaaacggagatctccgtcccgctggccttccaggtagccgctgactccagcgagcatgtggaaagaagggcgagactggcctgtcgggatgctttcaagcaaacgaaattgatacggcgtatcttgcccgatattgcggaggtgctcgatgctcgtgatgatcttggaaaaggtgccgacgagtctgaagggcgagctatctcgctggctgatcgagcccaaggctggggttttccttggaagtccgacggccagaatacgggataagctgtggcagaaggccgtcaagaaacgtaaacggggatacatcctgcaaatatggtctgattccagcccacaggggtacagtttccgttccgagggcgagtcttttcgccaaatggttgacttcgagggcattgcccttgtggcccgcgtgggcaagggctagttcgagtgagtcccaacatattgcggttaggcaattggtggcatacaatgccgtggtattgtccccacgcacgtgggggtgaaccggcaaaacgtttcatcgcgttgtctgcaatctcattgtccccacgcacgtgggggtgaaccgggcgtgaggtcggccggacgatacccttcaagtattgtccccacgcacgtgggggtgaaccgcgataaaacagaaaacccaccctatcgtatccattgtccccacgcacgtgggggtgaaccgatagggaacgaagagatggcattgacgcgacgattgtccccacgcacgtgggggtgaaccgtaaggttgatctgtgcaagcttgtccgtaacaattgtccccacgcacgtgggggtgaaccgctagaggctcacgacagaaagggccaccgaggattgtccccacgcacgtgggggtgaaccggagccgaggcgtcgatcgtcccccagacggtaattgtccccacgcacgtgggggtgaaccgccgaccgcctgcccgcctccgtcgcccgagccattgtccccacgcacgtgggggtgaaccggccacgtaaagcccttgtatatctatggttgcattgtccccacgcacgtgggggtgaaccgacgacgcactacgccatcactggggcgattaccattgtccccacgcacgtgggggtgaaccgatccaggggccaatacacacaatcctgattttattgtccccacgcacgtgggggtgaaccgcattcccttccaccgtaatcgcgggcgtcatcattgtccccacgcacgtgggggtgaaccgaacagtgtgcggaatgactacattgcgtgggtcattgtccccacgcacgtgggggtgaaccggacatcttccccgctggtatgacgggcgtgacgattgtccccacgcacgtgggggtgaaccgatggcgattgaattcggcataacccccgtgtcattgtccccacgcacgtgggggtgaaccgtaacgcccaagcaagtccaggtcgttctggatgattgtccccacgcacgtgggggtgaaccgtaccatgggcgcttttctcctttattcattgttattgtccccacgcacgtgggggtgaacccgcatccgacgaattggacagaaaagcaaacatattgtccccacgcacgtgggggtgaaccgccatcgcagacttgacccgcgaagaggtacggattgtccccacgcacgtgggggtgaaccgagagcaggggagcggggcgtgatggttcgtgaattgtccccacgcacgtgggggtgaaccaatcgtatatatcgccgcttctacgctcatgcgattgtccccacgcacgtgggggtgaaccgacaagatacaaacgtggaatggcttcacgtggattgtccccacgcacgtgggggtgaaccgtagtaggtgccgcgaaagatcaccgtgccgctcattgtccccacgcacgtgggggtgaaccgtgctgcatcgtggtacaagcactaagcctcgcattgtccccacgcacgtgggggtgaaccgcacagcgaaattcaggatattcgcagccttgacattgtccccacgcacgtgggggtgaaccgccggccgaccagaagggcgagaagatcgtgatcattgtccccacgcacgtgggggtgaaccgattgctaaattcagattttagcgcccatgatcattgtccccacgcacgtgggggtgaaccggtgggccgggggactaactgaaaggaccaaccattgtccccacgcacgtgggggtgaaccgacagagtcatcataacagccgacctggccagtatagtccccacgcacgtgggggtgaaccgggagacgggaaacttgatgaagaactctggtcattgtccccacgcacgtgggggtgaaccggcggctgccaggctagacatcctcggactcctggtttggcttgtagttgacctcgacgctcttgaacgtcctgccgcagtcttggcagcgatggtaacggacgggcacatggttgctgtcgtagaccgggcaatgcgtcgaaccacacgcgggacagcggacgcgcatgaagggcacgaagtctgggttagctcggcggcgtggttgccgaggccgctcacctggtgttccaagttccggtaagtcgtccaggaagcccgtcattgcgataacctcggcagcccctgcagaaagcccttgttctgttggtcgctacggtcgcttcgtttcgcgggcgctgccggcatcggcggcgcgacgagtgcctccaggaggccgacgccgaccagttcggccgccgccgtcgcgtagaccaggcagtcccagaggtggttgtcgccgccgccggcgcgcttgacccatcggatctctttccgttcgcccttgatgaccgcctcctgttcttcgctgcagagatggttcttgacttcctggctcgtctcgccgtgcaggtgcatgtagccggggccgggaacctcggcttcgaacagcaggcggaacaggcggttcttgatctcatcgacgttcagatcgtaccgagcgacgatcttatcgatcgggctcttccgatagatccgagccttgacccgatcgtcgccgcgcacggggatcgcacgcaagtgggcgttctggcgacagaagttgatcacgacgtcgtactcgtaaccgcaatcgacgcccgtcatcgcggtcggcagcagcagattgcgatcgtgcgaaaacggccagggccgcgcgatcaattgacggacccggccgaagttctctaattccttggtcgcgccggtctcgatgcgcccctcatcgagcagccacgcctcgaacagatagccccagccgacgaccgcgtaccagatgtgatcgagctgcacgtcgatcccgatcgtgatcgcctggacgcccggcgggatcagaccgcgctcgtagctgccgatgtgcggatcgagcttggattcctccggttccttctcgcggaaccgccaggcccgggccatctccgaacggctccagtgttgcagcggccgaaagttcccttccttcagcgacgtttgggcccggacgtacttggccgccagctggccgatcgactggaaacgcgggttgaccatgaacgccgagatccggtaactgcgccgcgcggtctcgggcaactcgcccaggatgtcaccaccgctgttgaccgtgcagccatgcggggcccaccgcccggcggtgatcgcctcgtgacggtcccgctcgctccagaccgccccgcactcggggcagacgtaccgtgcgcggtcgcctttctcgtagacctccggatcgaggaagcggccggtgaggctcttatcgaggaccatatgcctgtcgtcaaacgtatggtgttcgctgcagtgggggcactgggggtgaaactgccgcttgtcgccggcctcgtattcgcggtcggccaggtcgccctcatcgaccgggctggtggtcttaatcaaggtcgcgcgatggccgaaggtgcgcaaccgatcgcgcagcagattcaaagggtccgcctccttgccgacggccggcgggaatttaccgatctcatcggccaggatccgcgcgaccgggacgtcggccagttgcgctgcgctccgcgcccaggcgagatagaggttcatctggtccatcaccgttgcctcgccgatgtgcaggttctccagccgcccgccaatcgctttcaggaggaacgggttggcctcgaagatcggccgcacgcgggcggcgatacgacgcttgaccgtcgattcgtccggcatgacgatcatcgtatggacgggatcgacggcgatcgtataggccaggaccaggtaactgatcagcgtcttgcccgcctgggtgcaggcgtagatggtcacctcggagacggccgggtcgacgcaggcctcggcgatctcacgcaggaagggcgagaagtaaaacgagaacaggccgggcgccgtcgtctccttggccggcaggaacagattcgcctccgcccagtcgcagatcggcgccctcggcggcggcacccacaattcctgctcgcgcggcaggacctccagcgatgggccgagcagttcaaccatcgcgctcctcccgttcgcccagggccgctgcaggcggcgtttcgagccggcccaggaaggccttgaactcggcggccgtcgcctcatcgagacgcagttcggtcgggacctcagtcatctgctctcgcaggccttcgacaaaccgacgcaaccgctgctcgatcgcggcggcggccttgccttcgcagtcggcggccgtcgccggcagatggttctcgacgtaggccagcagattctgcacgcgggcgaccaggccgttctcgaccgcctggcgatcgagaacgtgggcctgggccttccggtagtcgagttccttcatcgctgcgttggcgacgcggaggcggtcctcgcgcttgccgctcttggcctgggccttggtcgcggcctcgaaccagcggacgaactcgctgaggttataggtgcagtcgggattgcggggcaggccggcgtcccgggtccaggcggccagggtctggcggaccttgccggtgatggcctccatcaccttgatcgggacatgctcgtaatcgaagccggtcgggctcttctcgctgcggaggaagttctcgacgtagcgcatggcgttgggcttgccggcgccggcctgctcgaccatcacggcgttgagcttcatgcgcagttgacggcggttttcattccacaggtcggcgacctcggtgtcggtatcgagcagttgccgcagctccggaccggtgacgcccatctccttggccgccgccgagacggtgacggtcgtcgcggccagttgcgagaccttgcgcagcagccgaccccgctcccaggcggcccggacgttgtcgcgtttggcgatcagggcaaccagatcaccgggcccgctgaacagcaccgccgcctcggtcaggttctcgcactccaggcccaggtgccgcacctcggccagcgagaccgtccggcggcgtttcccgtccgccggcggggtgcggggcttctttttcgtcttttttctggccatttcgtaccgcttcagttcctcaacctcggcgcgagacagcggctgattctgccggaccttgcccagcagatacgcgtgacgctgcttctgcgcgatctcaatcgccgatacctcgtgactcaatccttcctactttccccaccagtcgttacaatgcttcgctctttcatggcgacgcgcgcaagtcgtcggcagtggcagctgccggcggggcggttcgaccaccagtcaccgcccgcgtcgccgtctcttttctcgcaccgctttgcgcccggtccacgtctcccagcgcttgaccgccacgtcgacgaacagcggctgctgctcgatcgcgtagcagcggcgcccgagcttctcggccgcgacgatctgcgtgcctgaaccgctgaacggctcgtagcagatgtcaccgggccgggtgtggattcgcatcgggatcgcaaagcactccaccggcttgatcgtcggatggcccagggccggcgcgcgtttcttgccgtcccagcccagctcccagacgtcgctgtaatactccggcgtcgtcggatcgcccgctttctgataacccaccgaccagacggccgtcagcttgttggtgtccgatcgctgccggccgtcgatggcgggcttttgtttcttcacccagatcagcaggcacggctcgtgacgcagggcgtagtaacagaagctcaacacgcaaatcggtttgacccagatgatgttctgatggatgtgcagaccgagttcactacagacctgctcgatgtcggtgcggcgacgatcggcgtgccaaaggtacagggctgtcccttcctggatgacctcgaggccgcacctggtgaaatcccgcatgaaggtaagggcgtcggtgatctcacgctcacggaactgatccgaccaatccttgccgcctttgccgggccggttggtgccggtgtagtcgatgcagtagggtggatcggtggcaaagagcctggccgtctcgccggccatcagtcgtgtcacgtcctcgggtttggtgctgtcaccgcagagcaggcggtgctcgccgagtaaccagaggtccccatcttgcgtgatggccgtctccggcggcgcgggcatctcgtcgtcgggggcctggccctgcttttccgaaggtttttggatctcgctgtagagggcgtcgacaccgaggtcggccagggcggtccggtcgcccagttcgtcacggagctgctcgatatagccgtccagttcggcggtgaaccggccctggatgtgagggttgttcagcgtcaggttcagcagcttttcctcggcggccgaacaggagacggtgacacacaatacccgatcgacgccgcgcgcgccgagcacggccaggcgctgatggcctccgacgacgcgacgcttgccgccccggacgttcaccacgatcggctcgacacagccgaaccgctcgatggacgcggccaggccggccagggccgactcggaaatcacgcgggggttgtactcggcgctctgcagctcggccaattgaaacgtcgctaccttcggaacggcgatggtttttgatgacttcacggtgttgactctcctcaggccgggaccttgagacgctcgaaggcgccggcgtggcatttgggacattgttcgggcggcttcctcgctcgacaccgaggccggctcagccgtaaaagtgcctgtttggtccatctgtaacccctttatttgcagtgcgttatgtatgtaaaaccaaaaaaataaatcccaaagtagccgaacctcgcgatcccgcgaccgctcggcgtctattccggaggaggacccaccagatataaaccctgtctgcgcaatcgtttacacgcggcctgttgggcagtgatcttggtggcattaaaggcgacagtgtcactctgtttctctctcgatcggttcgatgcggtttaacatcgctcacagattcccgctcccggccttggccagcaggctgtcccagatccggcagaacatcgcccccggcctcttgagccggggcttcttgctcgtgtggtgcttgcgagcctggcggcgggcctcgccccacagcgtcgcggcgatcggcggtggcagggcggcccgctcggccttcgtccagcaggcggcgaacgtgcccagctctcgggccttctgggtgcgcaggtaggccaggcccaggtcctcgtagatcgcagcggcgaactccttggcggcgtcgctgtatcgctgctcgaagccctcgggttctgctggcggcccggtcccatcgagcacctggccgatgcgtgccagttcgccggcgattagcgaccccggggggcctttggcctgcgtcggcctgtcggccccccgagcgtcgacttcggtcgcccctggtggtgggtgtgcggctgctctgtccccttgagcgtcggcttcggtcggcacagtcggcgtcggcgtcggcgataacggcggggtggtggtcggggatgtggtggttcctgcttggcttgggggttgcccttggtccttgccggtcacttggtcttgccctgggctttcggctggtcccttcggcgtttcggttcggcttgccttgggtttcggattgggcttgggattctgtttgccgtttacttctttctttttctttccattgcccttgccgttgccgttcccttcccttttcaaagggctccggatttctccggatttttccgcagaccccgccgtgcccggcttctcgttgaccgagaggtcaaagtcgggcatttcgacgcgttcgatcagaccgaccgcttccagccgtttgaggaccttgcgggcctcgggcgtcttgacgttcagcacgtcgcagatatcggcgatccccgccggcgcccgcttgccgttgagcaggtagccccggtaggcgcggctccgatcggccgcctcattgcgcagggcgatgaacgccccatgcaaggccaggtggttgtcgtagcgcttcagcgcccgcagctgcaggcagtagtccttggcgctgtcgtcgttgttgctgaccgcctcgcgacagaacagcagcgggcccttgcgacaggcccgcgcatcttcgctcagctcgaagcggtcctcaaactcgtatatgtgccataccttcgggcgtttcccactcggcattcaagccctccgtggctagcggttctctctgatgcgcccggcctaagcggccttgccttcgccggcggcggccctctcggtctcggagacgacggcctcgtcgcaccaggcctgcagatccagcttgagcatctcggcgatcagctgtattaccgcccggtcctcttcgctgccactgggcggggcgcagtcgagcccctcggtcgcctggccccagagccgcttcagcacgacgtcgaggacgttcgacgggccttgcttgcgggccttctcgatcgcttggcgatagtccgccatcccgtcgtatccgaactgggcatcggtcgcgtagaacgtcgccaccagcgggacgatcgtcagcttgttatccggcagatccgcatacgccagatccatcaggtgctgcgcgaaccgattggccacgaagtcccaccgcgcccgctcggcggaggccttctgctcggcggccgagggcttgcgtgccttctggctggccagtgtcggcgtcttcttgaccttgacgtagcggaccttgcccttgtcccgcccggcgacgatcagcgcgggcgtcgcccctttgtccttcttcttgcagatcgtcacgtcgcccttgctcagaaccttgccataacagcgtttcagcttcgtggcgttctcattgacgaaactcgcgttgctgagaaggaccaggccgtcgtatttctgccgcatcgccgcgacctggcgtttcgccgccgaggcctcgcgcttggcccaacacttcgggtccagacaccgatcgcccggcttgatcgtggtcgtcaccgttacgcctccatcggccgatttcattgtttgcggtgcgtcccacagcagcggctggcagctggtccgcttggtgcacgtgacgcacttgctctcgctactcgtatcgaacggcgctttgcccagcagcttctgctcgtcggcggtctgtttttccagctcctcgacggtccagtcggcgcagtgactccagggccagttccccttcttgagcttgccgtgccaggcctcttgcacattggccgggaaccgcgcgatcgccgccaggtggccggccccccagccggtcaatccgccgggcgccatctcgccgcgccagcagtcggccagctgttcgtgaacggccgcccgcagcgccacccagcgcggggtctgtcccatcagtacgccggccgccttggcattcccttggcacttggccagagccgtggccgccgcctggccctgttccagcggcgtcaagtcctcgcggttggcgttttcgatgaaggcgatacggaacgccgcctcgtcatccatcgccccgtaatcgatcaccgggacctcggggcacttggccgccagggcggcgcgatgtcgccgatggccggccaggatctcgaacttgtccttgcggctcgggtgggtccgcacctgcagcggctgttggacgccgagcttgcgaaccgactcgataagtgcgatgaacgcgggatctttctcgttgatcgttctcgggttgtccgggttcggtaccagccgcttcggcggcaattgttccagcttcataactgtcctttcaagtttcatcgtccgtgacttacaattcgtgaaaagggcaggcacggaggccagcccctactaatccccgccaccgtggcaatcgacgccgtcggggtccttgtgtttgcgcagcacgttgcggccgttgagcttgcgataggcgacctcgcgcccgcactcgttgcagatcaccttgcccagccaggtggtcgtgtccttgcccgcctcggccgccggcttcggcttgaccttgcgcgcggccgttcggtcgatcacggcgttgcgatcgaccacgatctcgccgtcttcccattcggccttgtagcgcgtcaccatcgacggcagtaggctgaaatggcgcagcgccccggcgccgctgattcggaacgcctggcccggccgcgtcttcgaggcccaggccagcgccccgacctcctggcgcgacgtcggccgtaggattatcgcgttggcctccttacagaatccgacccgacagccgtcggtctcttttagattgatcccctcggccagttcgacactgacactgatcgtgccgctaggcgtcagcgtgacaaaccgccccttcgccacccggttggtgtcgccggtgtaaaactcggtctctcgcttgtccttcttcgccatgattatccttcctgtttgcacggttgcacctggcggcgtcgccattcgtcgagccagacgaggtcttctgctgaattgttcgggcactgttccggctcgaccgccaggcactggcccggctcgcccggctcccaaagatcgcacggccgctggcagtactcgcagagcgccgggtcactcatcgtcccgcccccatgcgcttgcgcaccttgttcggcacccagacccgcaccggttcgccccgacgccgtcgccgccgtttgcgtttcggcttcgtcgcggtcgcgcggccgtcggtcttgcgcaaggcccgcccgcgcgtcaataagtcactcagtcgcatcggtccctcctttcgggtccaatttgtcgagcactttcaacacgcgcaggcgggccccagcctgactaaggcccggcccgtcgagatcctcgcagatgattcccttcctcatcggctcacctcacggatgtcggtgttcgtgtagggaataggcccgtcggccaggtattgggccaggtcgaccttgacggtgtaggtcttgccgaacttctcgcagagcacgacggccttgaccgcgtaggcctgccagtcgatggccgcttcgcgctctttgtcgtgattgagcttaccgagcatgaaatggtcgacgtggtcggccgcccgtatgatcagctccagcgattgggtcgggtcaatgaccggctccatcgatgcccaggtgaagatcccggccgccttggcatgcgccagggccttaatgcgactgtgaggtgacgcggcgtgcggttcgtgttctcggcacaggtcgtcatcggagaacgtcagcgaggccccgaaggcgtcacgcgggccgtagaggtggaagtcacgcgtcgcgcggagcccgcccttggtcaggatcgtaaacggcacatcgttgtcgcgcaggatcgtgatggccttcttcgtgacgcgctgctcgaaggcggggccctgatacggatcgcaggtaaagcacaacagcacgcgcttgttcgtctcggccaaggccggggcttgtcgcttcagccccgcgatcacgccgtcccgcggtccgcatttggcgatgaagacttcgcgactcttgtgcaacgtcgccggcccgtagcagtagtcacagccatgccggcagcccttaaacaggttggcggccaggtggctgtattcccccgcccggcccttcggttcgtagatcacttgcattgactcgctcccttccaattccaatgagggcgggcacgggggcaccgcccctacacgtttacacccttcgcactcttgtgacgctgaatccggccgtcagcaggcccagcggccagagccagccgaggatcgggtgatggttcgccggcggtttgccgtcgatgcagacggtgtaatagcccgtcttggcctcggcgtacggtgggtcatcggtgatactgacgtagatgtactgcggacccggcaggacctcaccggccagcgtccaggtcccggtgttcgggtcggatgtcaccgaccagcccggcgtgcggctggccacggtgtaccggtggccgtcgggatcgcaggccgggccctggcgaaacagcttgcccgtcggcacggtgtaggcgacagcaccgctgagcgtgtcgatcaccgccggcaggacgagcccctcgatcagattcggatcggcccagggcggcctctcgtagtggatctgctcgcaaggcggcgcgttcggctcgtcggccacaactaccagcgtcgtggcctggccgatcgagcagagggccagcagcaataaaccggttcttcgcttcatgtccgctcctttcgttgctcgtcgaacttgtccgccttgcgcgccagatagcccataatgcccgccgccccgaagcaccagcagaacgactcgatccacgaaggggagataacggcgaatccgtacaagcccagtgagacaatgcccaagaacagattcatggttgcccctttcgccagcggtagccggccgcccaggcccgatcgaaatagccctggacctcgtcgtagatatcccggccgccgaggtgctcgggctggaggtattggtcgtagagcccgagccggccggtgacgtggaacggagtcaccggccaaaggcccttgaagcaccaggcaacggcgtcgtcgtagatctcgcagcgggccgcttgctcgtcggcccgggtcatcagacggcatcgggccagcagcgtcaccgccagggccttacccaacggcagcggcgtggtctcggccctctcgaagcgcgggtcgggcttctgcgatgagacgatcaggatcggcccgcgccagtcggtcgccttggtccgcgtctcgatcgtcttgttaccgtcggcgatccaggaggcccacggttgtttgacagacagtgccggcaggatcatggttcgtacctccgcaggtgcagcgtcgttagcgttcggcaggtccaggcccgccaggtgtccaggtccatccagacgtcacagtcctcggcgagtgcatcatggtcgacgtcggccagggccttctgctcgacggccaggtaaaccggctcagcgccccagaacttcatgtaaccgatcacctcgccggcgcggccgccgctcgattcgacaatctcgtagacgtcactctgcatggctcagccgttcttgagggtcttgacgttgttggcggtggttgtgccctggcggtccttcagcaccgcgatcgcggcggcctcgtcggtgatctggggcgagtcgagcagcgagtcgaccgaatggatcacgttgaccaggtccttgcccagcgctgtggcggcctgcgactttttccaggccaggtaggcgccgccggcggcggtgatcaggctgccggccaggccgacatagacgccgtagggcgccgggacgtgcgatccgaccgtggtgatccccttgccgagcagctcgatctcgtcgccgatcccctcgaccgggccggcgttggccagcacccgctcccagtcggtcagcacgtcatcgacctttcccttgactccccgggccacggtcagcttttcctgggccaccacgacggcggccgcaatcttctcgatttcctcggcgggcagattcgggtcggccagggccgcctggctcttggtcaggaacgcttcgagctggtcgacgaccatttcgacctgctcgcttttctgctgggccacggcgacggcctgctcggtcgccgcgatccgctcggggctgtccatattgcagccgccgatcgggatcagccaggtcaacgcggcgatgatgcagagtgtcttgattcgcatgtgcttcctttcgctaaaatgtgggttcaaacggttcgggccagtgccgacagaggtgacatccctcggggcactggccgctctcggtcttcagggggcagggcggcgtttcggggtgggccatttcagacgacccccagactcgctcgccgctcaacggctccttttgggtggtgatgtgcatggtacccttccttctgctcttgcctggccgccttcagttgccggttgaagcgttcgatgcgggcgatcgtctctggcgtcggcggcacccagcattcgtagagcgtgacctggctaaagtaacgcgacgccgcccggcgccgcaggcccgcgatcgccgcttcataggccgccccgatcttcgtgcggatcggccagaaatagggccgcagctcggcgtgctgggtgaccgcgaccagctcaaaacgccagacgccgcgattgcgccagccctggccgtcgacgcgagccgcctgatcaaagaacaaccccggaaatggcccctcttcgtcatacgcctcaatgatccgcaccgccatcgggcagctcctcgaacaggtcggcgtgctcggtctcgacgcgcagctcgacgatggcgtgcttctcgcgaaccaagaactccagctcggccaggcgatcgtcgggcaccacgacgtcttggaatgtcaacgtgcaatccttgaccacgccgaacatggagatcggcttgatctcggagtgttccttgtcgggcaccagtagcagggcgacgggtctctcgcgggccttgctcttgagcaggaacgccgactcgctcggatcgatcgagagtttgacgacgccgctcttgacggtgcggtcctcgaccgaagccgggcaggtgaatttgagtttacgcgtcttggccatagccttcctttcctgggtagagtggatgaatcaatagcgggggccggactcgaaccggcgacctttcgggaatgaaccgaccgcgctaaccaactgcgccaccccgcgatcaagccgtgatatttgtatgccccccacggccaggggcctccgttggcgcttgggcaggcaaaagaggcgggccccggcaacgacccatggaaccggggcccaaccacaacaaaaggacagggggaagtgaacgggttcgggcgggcctttcacccgcccggcgggacagttgcagcggcaagctcccgctatgaccaggggccctcggtcgcgacgatccgccgttgtgtcgcaacgtcatggggccagtcgaaagtaattatcgagaagaacagagggcccggggggagaggtggttttgagagcccgccgactacctggtcgggccgctctgtcgaagaatgtcacgccgccgtgtcaagagtgtggcaaaaaactcttggtctcaggggtgaaagctgctagaatacggccttgagagcacgttaagaccgtttataacctggagtaccgagcttccaagctgattacgcgggttcgattcccgccacccgcttttttccccgcgctgtttgcaataggctccctatcgacccatttgccgggcgggttttcggtttttcctctgttcggcccatccagagcctatccttagtcatctccagaggtatgagcaaccacgcggcgcaaggccatgcacctgccgtccgtctgatctgcgcctggtatttgagcccactcgttcccaaaagggggcgagtttggacgtggaatctacagccagatttgacttctccgcccttggcacgcgtggaattgcagatatggctccggatgggtctgggagtgacactgtcttggctggtgacagagccggcaggaggtggtgacgagtgggtggaagtgggacccggtgacggactcgggaccagcggtctctcgatccccgccgccggggcgagactttccaagggggttcacgattccgtgttatagggcaaagcaggggtagcggtttcgtaaatgcctttaacggttgcagttaagttgctactccgtgacggtcctataaacaatcgccccaaaaaaacgacaaaatgcatttttggaggttgacgaagtgggtgtgagtggggataattcccaaacgctttgtgttgagtggggcaattgccatgcttttactaaccggtgaataccagcacgttgtagacggcaaaggaagagtgctcgtctccaacaagcttcgaagccagatcgacgtcgatgagcatggtcgtaacttctacctcgttctcggggccaacggtgtgttgtgcctgtaccccgagaagtactttgagcagatcgttctggccgtggcccctggggcgacggctccggatgaagcggtggcgttcgaacgcatcagcttcgccttggccagcaagatcgaattggacggtcagggccgcctgttgatcggcgagaagctgcgtaagcgggccgggctggcggacgacatcaccctggtcggtgtcagggaccacattgagttgtggaacaatgaagattgggaacgctatctgtcggatcatatgggtcagtaccagaaacagatgacgcaggcccggcagcttgttttgcagaagcaacagaaggaattataaacgctgcgttggaggcaatggacagggatggatagttgctattgtcaggttgtcgccgggactctggcaggggaacggccgatggacgagcatacgcacgcctcggtggcgattctgggcgagcgtttggagcgtctcaaagagcacggtgggctcttcgccggcatcgagttctcaccgcatgtccagcgattgcgacaacgctctgagccggtatcgataggctgaaagggcgtgcaaagttcaggagtgaatcgctcagaagttgaacacgttccggtactttcggaacctttggccgaacagataaacttaccccaggatggggtgatggtcgatgtgaccgtgggacacggaggtcacagttttctgttcggtcagaagctgggtccgcaaggcacgctgatcgggctggatatcgacagtttgtctctggagcgggccgagcaacggttggcgggccttggctgcaaggtggttctgattaaatccaatttttccgcggttgctgaacgtcttgacgaattgggcgttcctgcggtcgatttcatcctggcggatttggggctgtgctcggcgcaattggcggatgcggatctgggacttagttttcgcgatgaagatatgccgttggacatgagaattgacgaaagcttggagacgacagcggccgatatagtgaatgggtacgacgagaaggccctggcggatctgatctacgaatacggccaggatcgcgcctctcgacgtatcgcgcgttacatcgttcgacgacggcaacaagaaccaatcatcacgaccggccaactcgtgcaggtcgtgtgcagcgccttgtataagggcggctcgaagcggcgagccagaaaacacccggccacccggacgtttcaggcgctgcgaatagcggtgaaccgagagttggagaacctgaaaatgttactctcctcggctccggcgttgctcaaacagggcggcagcctggcgatcatcagctttcatagcctggaagacggtctggtcaagcgcgatttcaaggcacaccagcaggcgggcctctatcagatcctgacgaagaaaccgatggtggccgatcgggacgaggttgcggccaaccggcgggctcggagtgcgaaactgagaatggcccgcaaaactgagatcaatgaacaagaataggcatggcaggatgcttttacgaaggaacgggttaacggcaaggaacggagtgcgactatgacgtcagatgcgaaaatcggcttgctcttgggattggtgttcatctttgtcattgcctttatcatcaacgggctacccaactttggcaaccggtcgcaagccgaggcggcgccgatgacgaattttccggacgagaacctgggtgtggccgacagcgcccagagtgcccaggagcagctcgactgggagggtctgctggcgcaagggagcgaagagcaaaccgagtttcagccggtcgaagcggaagtcgaaccgagcgtggcgctaccggcgacgacggttgcgacggacaccgagaacggggccgttcgctccgttcatacgcttgactcgctgatgggaggggtctcccggaccatcgaagacgtgattaagggaattggtgaggcctcgcagtcggtcacgctgcaggccgaaacgagcgaaccggccccggcgatcgagatgcccgggcggcagccgatcgcccaaccggtccagacggcgcggtcccaaaggccgacgccggcggaaaagcccgcccgcaagcccggaaagaagtctgcatcgcgggtctacgtggttcaggatggcgacgttctggccacggtggccaagaaggcctatggtcctgaagagggcaacaagctggccaatatcaagcgcatttaccaggctaatagcatgatcttgaatagccccgacgagattgtggtggggcagaagctggtcattccgccgttgcccaagggtaaggtcggagccgccgatccggcggccgtgctggctgggccgcacttcgagaaggtcggcaccgcctccagaaaggccctggctgatgtgaaacagggcaagcctaaggggtggtactacgtcgttcaggatggtgacaacttgtggaaaatcgccgtgacgcaactgaacagcgggtcgcgcagcgaggagatcgccaagctcaacagcgatatcctcaagagcaaggacgctctgaccattgggatgcgcctgcgccttccggcgaaatagaatcaagccggcgagcccggcgtgtggagacaaggacttctcaacggcgacaacgacatggcttctcgattgtgcttcgcgtttgtcatcttcttctttgcagccatcctgattctggcggtctatctgcgcagcgccaaccaccgtgttttttacacgttgcggcgacaaacgattgagcagcatcagcttcagcaggagttgtggcagaagcagttgagggtcgaggtgttgaccagtccggccgccgtgctgcagcggttggatcaataagacggacgctggtgtggcaaccgcccacgtgcgctcgtgctcgatgaacgaatgtcaggacagatagcagcaagcgaaggatgccgtgtatggagacaagggacgtcatggggagcgaatcgacccgcggccgatcccctgatgattgttcgcggcgcgagcgaatcacgatcgtcgtattcgtctccgtgatcatcgcggctttcgcggccctgggtgggcgatgctactacctgcaatacgctgcggccgatcactatgagcaactgagtctgcgccagcaatgctcgtttcttcccctggagccccaacgcggggccatcctggatagtcgtggtcgcgttttggccgccagcaatcagattcgcacgatcttcgccgagccccgcgtcatcgccgagcccaaggagacggctaacgtattggcgccgattctcgatatgggggggcacgagatctgcaagctgatcaccgagagtcgcaatcccggctacgtggccctcaaggtcgatgccgaagttgagacgtgtgatctggcccgcgccgtgtacggcgtcggcgtgcagtctgcctggcgtcggcattacctgacggggcgtctggcctcccatgtcgtcggctttaccagccgggataatcgaggtctgggcggcgtcgagaaccgattcgacgcggagttgcgcggtgagggggcccggcatgcgttcaatgtggatgtccaacgccggcctctgtccttcgccgtggcccagaatacgggtgataacgccgtcccgaccaacggcagcgccatcatcttaactctggacgcagcgatccagcaattcgcgcgcgaagagttgctcaagcagtacaaggagtacgacgctgaaagcgctttggcggtcgtcgctgatccgcatacaggcgccattttggcgatggtctcgctgtccgatttcgatccggacaacgtcggacgcacgaatcccgatcacttcctcaaccacgtgctgaccgaccaattcgagcctggcagtatgattaagcccattgttgccgccatcgccctggacacaggggcggtgagcaagtacgaaacgatcttctgcgagaacggcaactaccggggtcatggcttcggccggatcggggagttcgacaagggtttcggcgatctgacgttgcgcgagattctcgtgaactccagcaatatcgggatggccaagatcggacagcgcatgggccccgagcggctctacgaaggattgacgctgttcggtttcggcaagaagatcggcttcgacctgcccggcgaggccgaagggctgctgcgtcatccatctgcctggacgggctacagcatcacccgaattcccttcggccaggagatctcggttactgctctgcaaatggtgcgagcctactgcatgctcgccaacgggggacgcctggtgcggccttacctggtcaaggttgtggttcagccggacggatcgatggtggatgtcaggcctccggcgctgcgtgtcggctacgtgatcaaacccgagatcgccaagtgggtggtcagcgaggcactggtctccgtcgtcaacgaaggcaccggccaccgggccaagttggagaaatggcaggtctttggcaagacgggcacggcccaactggcgcgcagcgacggacgcggctacgagcccaaggcctacgtggtttcgttcatctgcggcgccccggctgaagatccccgagtcgtcgttctcgtctcgattcgacgaccgaacacggcgatcaagggacgcttcaccggcggcggcagcgtcgcttcgcccgtcgcggcggcgattctcgaaaaggtcatgacctatctcgaaggtacggaccctgccaaggcgaccatcgcccgggccgcgccgtagagcggcagacgtgcttgctgggggcaatcgcctcgtcaggtatcgacttccggcgttgtcggcctcagccttttcctgcatcgccatagtgttctactgtgattttatggggcgtgcacagccgaagaacagatgggccccgacagggcgtcgagccacgttggggacctggggcacattgtgcatggacggaatatagacgtttggcacgaagaagggggcattatgccaacgatgctgcaagcggattgtcatctcgatatcgaccgtctgtgggagctgttcaaggagacgggcgaggcttgctatcggaatcttctggtggatcgttaccactatctggtcgaacgcactgccacgcatttgcatcaaaggctgccgggcgctgtggagcttgatgatctgatcagcgtcggcgtttttgggttgatgagcgcggtggagagcttcgatcgaaaccgggccgtccagttcaagacgtactgcgtgcatcggatcaggggcgctatcctggacgaactacggcagacagattgggtgccccgcaccgtccgcaggcgggctagcgaactatcgactgccgtgcagtctctccaactgcatctggggcgcagacccaccgaatgcgaaatcgccgacgaacttggcgtggacgagttcgaagtagagaagctgcggcgatacagtacggccccgcgcgtgacctcgtttgatgagatgtgcggtgagggtgaggatagcgagggcatgcggcggttgaatctcgtggcggccaagaaagcccatacgccctgtcggcgagcgcgccggcgcgagttgctggaccagttgacccacgggctgagccggaccgagaaactcattctcgtgctgtactattgcgaagacctgaccatgaaggaaatcggggtaacgctggggttatccgaatcacgcgtttcccagatgcactctctcctggtgactcgtctgcgggccaaggcctccagggggcagccggcattcagtgcgttacggcccgctctctgaccttgggtggggcactcccatcgctgtatatcatggccttttaggcgcctaagcggacccacgcccgcccgggtcatcattagaaactagctaaatcctgttttgcggacgcagttatggtacactattcggctgagtacaagatgtacggatgccggagcgtaacgccgcatggccagaataatctatgccgtcgcaggagagggatatgggcacagtagccgggcccatctggtcgggcagcgcctgcttgacgcgggccatgaggtgatgttcgtcgcctcccagaaggccttgcgctacctccgatcgatttacggcccagaggtcaaggagatcttcgggttgtcctttgcctatcgtcgcgggcggatcgaccccgtcgagacattcacgcggaaccttttccaggttgcgcgggccaagagtctcaacaagcggctcttcgagaaggtctatcgttcgttcaatcccgatctggttatcacggatttcgagccgttcaccggctggtgggcccggcggtctggcgtgccgttcatcagtctcgacaacgagcacatgctgaccgtgtgccgtctggagcaccgtttgcggtacgtcttgccacgcctgactgcgacggcggtgaccaagagtttcggcatcggggccggcacgtatgttgtgacgaatttcttcgacgcgccggtgaagaccgaccgagcgatcctggcgccacccattgtccggccgatcgtcaccacgatggagccttccgacgccgggcacgtcgtgatctactggaccacgggcacagaggaaacgcgcctgcggacggtactgcggaagttcccggggcagcggttcttcgtttatgggtttgacaagtccgcgaccgtggggaactgcgtcttcaagcgcccttcgaccgaggggtttcttgcagacttggcctcggcccacggggtggtggcctcggcggggctttcgttgctcagcgagtgtatgtactggcgcaagaaaatgctgcttctgcccttggccggccagtacgagcagattgtcaacgcgcattacttcgagaaactcggtttggggattaccgccaagcgtttgaatgaagcggttctggctcgcttcctggaccgactggacgaacccatttcgcaggacgaacgcattctctggcccgacaacgagaagttcttcgagacgctggagacggcgctgagtcgcctgcagacgccggtcagcattgccatacgagagattggcccgaaacgtcgttcgacggcgccgatggtgcgggcggaagactgacggatcggcgcccaaggtccgctctagggcaggaccgtcggttgcgacgccgtgcccacgtagcccttctcgatgcagaactggatgacatcgcgcgccagcggggccgcgtcgctggagccgtattcaccgccttcgacgatgacggccagcgcgatcttggccccttcgtgatcttcagcgaatcccgcgaaccaggcattgtaagggcgttcggtggacccggttttgccatagactttgacgccttgatccttcagggcacttggcccgaatactttgtttgccgagccgcctgattcgttcaccacggcgtccatcccatcgtaaacggtccggagggtctccacggagattcccaggtcggtgggtaaccccggcgcgggggattccggtttcaggaagagtcggggccggatcgctcgccctccacgggcgatggtggcgaaggagttggctacttgcaagggggttgcccagaggttgccttgcccgatgccgaagaggggaaggtctcgcttggccagcggaggaaggtcctcgagcgacttggtgctcttgggccgttccctgctgattagcccggcagcttgtcttagttgccgggggtccagatcgtttggccccggccatggacaggccagcggcaagcgacgtccgtagccaaagcggtacaaccaaccctgcaagactgccggttcgatatcgttggccagacgcgagaaatagacgttgcagctacctttgatggcgttgcgtgccttgttggtccacttctcgtcatggccgaagccgtgcttccgctggatcaagcagcgaggccaaccgcgcggaggcgcgtgggaggggcacgagataacggtgtcggccgtgacgacgccagcctccatcccggcaatcaggatgatcggtttgacggatgaacctgggggatagtcccgagccagggctcggttgagcagcggatgatggccgttctggaccagttcagcgtaatcggcgcgtacgcgattgttgtcataggtgggcagcgaaacgagggccaggatatcgccggtccggacttgcatgaccacgacggccatgttggcgtcggcgttcttgttcagggccgggttggtcaaatagttttcgatacgcgactgcagttcgatgtccagagtcaactggacgtcccgaccgaattcggtctccgtattgcggacgatctgaccgtcgatgtcgctgaccaactctccccggcggccgcgcagaatcggttcgcagacatactcgacgccaggtcggcgcccacagacttcgccttcgagatagctggccaggcggtcatgttcgaagagcgccttgtcgcggtcctgcgtggccccgccgacccagccgatggtctgggccgccacggagccatagggatactcacgttgccccttgggaacgacttccacatcgttgatgtccatgaactcgaactgggcggtgaagatgtcgtcctcggtcttcaactccagcagaggctggctctcgtatagatcgcgaatgtcatccacctgtccgatcagtttgtagcgttgattcggatcgggaaaatgccgttcgaagtcggagcgggccaccgacatgggaacgctggtgattcgcccgcgatactcggcgatgatgttggggtctggttcattaccgcgccaggcgaagaaggttcgcaagttccacatcttatcattcatgttcgtgatgcgatcttcgatctgggcctcggtgacgccgaactgggcgcaatcgtgtatgatgcggtcgaggtcggctcgccgcgcggtcgcctccttgaaaagatcatcgagggccgacgcgctgccgttctcctcagccaatagcttctgggcgaggatgacgcgccggtctctgaaacgactaagaccgtaatcgatggtgacctggaattcgggaatgtcggtagcgagcaccttgccgtttcgatcgaggatatctccacggagcgttttgagttgtttggatcgcccgcgctgcagcttcaatgcggccacttcgtcgcgcaacgaggagtcggccagcagttgcatttgcaccagcctgagcagtccgatccccaggagcaacagactggcagcaatgaatattctaactcgcttttcgtacatactgattcgcttggagaacgtcgacccgactgggtcgcgtctctgatgcttggccccatgtgtgtgatcgtccgtcccggcggcagcgctgtcgccttacagccgccacttgccacgccgacgtttcttcttatttatatgcatccaccaggccagcggcaagcacaaaaagggcccgagtagcgccgacaacaccggttgccagaagagttcgcgggccatattcagcggcgccgggtcggcgcgcagatgggccaggagatgggcgacaatggtagtcgtcagggccatgacgaagatcgcgattccctggtagggcagtcgtttgatcgagatgacattgttcaagtcggaaagcagcgtgccgaacaggccaaagctgatgatctgtggtcccatgaacccggtgaccgggttggccagatctgcggcaaagccgatggcaaaggacgtgattacggcgtcgctgggattgcattgaaccgcaaagaacaccagcaggatcagcagcaggtcgggcctgatgtcaggactacccagccagacgacgccgagaaagctggtttgcagaaccgttgcgatgacaatgagcacggcaaaccgccaccaacgcattcacctatacctcacgatggaaggattcgggattcgagcttcagcgccgtccattaccggccgggcacaatgacgtgcacgcccttcagatttgcgatgtcacagaccggttggaccgagatgttcaggaccacggggttttcgtccggcttgcagtccaccacgacagcggtgacaaagggaatctccggatagcccggggctttcagggcatagactcggtcgccttttcgggccttctgggccttgtgtctggagggtacctgcaccgcggcggtgttcgggccgttgcccgtcatgatcccctgggccttcatctgtgcgatgcgcaccggaattctggacgctggatcggtaatcagcctgactttggcggtttggttcaggacggcggagatcgtcccgatgacgctgaaatcgcccaggacaaattggcccacagccagacgatcgttttgcccgcgattgatcaatagttcactctggccctgcccgaggtcggataggacgctggcttcgactacgaccatgcgcttccaatcgggattgctgcgcacttgctgcaggtcggcgatctgttgctcggcggcgtccaaatgagcctcgcggttggcagcgatgttcgcgagttggcggttctctaccgccagttcctcgtagctttttgcacgtccggtctccgcccgagtggcggtccgcgccgccagggtcgcaacgcgcccggccgccagcggcccacggaacatccgggcatacgccaactggagcttacctgtcacggtggcgggggtgaagagaaagatcagcccgcccagcatgaagtagacgaacaagaatcgcttcgagattttgctgccctgtcttgtcattgccgtcggtaaaccgggtgtccgagggacgccaagcccatgaggctcgcggtggggttactcccaccctcggtcattgtggtccatggtatccttccatatctcgagattctcgaggtagacgctggtgcctcgggccacgcaactgagcgggtcctcgacggtgtggaccttcaggccggtggcgttggtcaggacgacgtccagcccgcggaggcaggacccgccgccgcagatgtggataccattgtcgatcaggtcggccgccaactccggttcggccttttccagcgtcgccgtcacggcgtcgatgatggccgtgatcgggtccttcaaggcctcgcgaatctcctcgctggtgataacgatcttgcggggcaggccgctgatggtgtcccgcccggcaatttccatcgtcatttcttcacgcaggagtgccgccgagccgatggcgatcttgaccttctcagctcgggcctctccaatcaggaggttgtacgttttcttgaggtggttgatcacggcctcgtccatgtcatcgccgccgatgcgaatggattctgcggttgcgatatcggccagtgacatgatggcgacctcggtggtgcccccgccgatatcgacgatcatggaggcggtcggttcggtgatgggcaatccggcgccgatgccggcggccatcggctcatcgaccaggtagaccttgcgggcgcccgcccgctcggcgctgtcgacgacggcgcgtcgttcgacggccgtaataccgctgggaaccgcgatcacgacgcgcggacggaccaagccgccccggccgtgtactttgcggatgaaataactcagcatggcctcggtcacttcgaagtcgctgatgacgccgtctttcataggacggatagcgctgatggaaccgggggttttgcccaacatttcccgcgccaccagcccgacggcctctccgtcgttcaacacgacgttggtccctttgcgcaccgccaccacagaaggttcgttcaggacgatacctttgtcgcggacacacaccagtgtggtacaggtaccgagatcgatacccatatccatactaaacatgccgaggatcgagtccaacagcacaaccgactcctttcttacgtggctattggcgtattgtgcgtgcccagagggggtatcgtcaagaggattctgactagggcatgccaaaaatcgtcttgtattgtgcgaagcactggaaggcgacgaaggcggacgtggccaccacgacgcccagcgcgacggcgagaatcgccgtgtagagattactgggaaccgagatggctccccgtgattgcggcatcggactcatatgtcactaacctcctggtcgcgaagcgaataccgaacaggcccggtcacgagcggttcacaggttggtggtgcaggtatcacccttacgcggttcggcctggatcagatccaggacgcccacggccttatcggcgtcgacgtcgaggatgacgatgtcacagacgaactgctggccgcgggtgacatggaatttcatgtcctgcttgacgccggcggctcggccgatcgagatctcagccagcgagttcttcaggtcgagggccgtgatgcttccgttgaggccgatgtccttggcggccggaggggccggttggacgatggcacgcgtcggagtcacgggcttgggggccgcggcggccttgccgtactgttgcaggtactggttcaaccgcgtctcgagctcctggttggcctcgatcaactgcttgttcttggattcgagttgcacgacgacggccattttctccatcagcaactggttgctctccttcagctccctgtcgagccgggtctgatcggagcggagcgccacgacatcctgctgggacgcctgagcctgctgcatctggctggcctgagtctcgttggccactttaacggccgcgcccatatcggtgaccttctgtaccaattgggctctctctcgtttgaccatatccaactgagcgctcagatcggaaaccgtgattcccagctctttgatctggttttgcagttgctcctgcgccttcaggtattcggccttcgcagtgtttcggtctgtatcagccgctttgctcagggcccgagccgactggtagtcctgctggagcttgtcggcacgctctcgctggttttctgcattggcgacgtaggtgaccacgatgccgcacaggaagatggaaaagacagtcagtaagacaatcagaaccttcgtaagcgtgctcaagacaggctcctttcacgaattagcgcgttttgtgtttctgcgacacttcattctatcggacgttaggctcaccgcatttatgcataattgggagagccacatcattgccagagattacactccaacccaccgtcccgatactgctactgcgtactttaattttacgcatgaggcctaaaaaggtcaagtcatttttcccaaatagcccaaatagaatgctttatatgcggcctgccgtcgctgggtgcgagttctcggaccttgcggggctctgggtgagcccaaggtccgagaactcgcatccagcgagaagcaccccctggccgtcttatcggttagcgatagtcaggacggctttggcagcagctaggcggacggtcggagacgtttcctggagcaggtcgggcaaatgcctggccagtgtgggcgtgccaatctcggcgatggccagagcggtcagaaccctgatgcggtcggcgctctggggccccaaggtggtcaggacatgtttgtcgaagacggcctggacctcggcttcgccgatggcgtcgcccaatttgcccagttgccgggcggcggccagtcgcacttcgagcagggggtcgtcgagcatggtgatcagcgcgttcttggcctcttcggtgcccagggcgcccatggcgcgaacgccgatcatgcggtcgtcggcataggcgctgatcaggcgggtccagagcttgggatagatgcgtcggtcacccagcatggcgatcgattcggccgcctggagcaggaccttgtcggtggaatcggggcgccgcaaggtccaataaagatactgcagcgcctcctgtcggccgctttttcccagcagcagggcggcgttggcgcggacggtctggtcttcactggccaccgcgtcgcggacgattcggaagtgatcgggctgacccagcttcatcagggcataagcggccgacattctgacattcatgtcggggtcgttcagcaaggccatgacttcttctgttgccagggcgaactccaggtcgcctaccgccagggctgccagaaaacgcacgggcaccgccgggtccgggagcatgcgctggatcttgggtagtagacgcacctcgccgacggtggagattacttcgactgcgttggcccgcacacggggatcgacgtcggtcaggccttcgagcaggatctgtcgtgcttcggattgaggatcgccgaccaggggacgacgccggacggacggattcgcaaagaccgggggagcggtcgccggctgcacctgcgccggtgcttcacagccgcatatggccggcagcaacagaaggaccgatattgtgccgaatacccggagtacgtattgcatattgagactcccgcgcgtcttgatgacttcaccctctatttcgttggtgggcgtgccgacttttgcgccttgcgccgacgcacacccaggatggccggcacgaccaggaccgcgacaaaggtcactgcacaaatcgtgtccaaccactgaccgtggcgactatagaacgtcacccttgtatctatcggcattctgtcggtgaaccatccaaccatagcggttcggcgcatggcgttggcgggaaatccttcactggcggcgcggtagccgtttcgcaggcgccccgtcgagtcgatcaggcaactgatgcccgtattgacgctgcgtaggatagggagacgattctcgacggcccggaagacacaggtcgcggcgtgctggggcaattcgctggtgggtttgacgtgcggaggggcgtccaggaatcggacgaaccagccatcgttgctgatatttaccagccagtcgacgcgcttgcgtccgttttcgtccagcgcgaagttgcgggcgacataggggatcgcgtcctcgtagcagatgatgacgccgaagcggtgcgtcacaggttgcccggtcgcctcggcgacgatcggggttgcattggcgtcggccggccggattggcgtggccatctcgaaaacggtgtagtccgtcccgtgctccagcgagtaatcgtattgatactctttgggtgtgaaccgtttgagctgctggtagagccagttgcagctgcggcggaagggaatgtactcgccgaacaggaccaggtgaatcttgctgtagcggttcgggtcgcgcgtcccgtcggcgcgatagaggaaggcggagttgtagtcgcccagatagcgctcgccttgagaatcggtcaggatttcgccgccataggcgccgacgagaaggtaggcattgcctcgtgcatgctctgcgagggtcttgtggaagatcctatcttcctccggcacggattgcaggaggggccacagttccggctggagcagggcttggaccatcgtctcgggccaggcgatcagctcggcgcctgcttgcaccgcttccttgctctgggctagaagctcattaaagaggtcatcggaggcttggtagctgttcttgaccgactgggggacgttggactgcagggcggctacgatagggccttcggagacacaggtatccgtctggcggaggcgccactggccgtagaaaacggtccccactacggccccgacaaccagcgccgtccgacagagaagcgacaggctggaaggctttctcttacgggcgaaaaacgagtcgagggcttcgcaggccagaagggtaaagcccttgccctctgcctcgggttcgacggattcggccagcctgggtcgggtcgcggcgaccgccaggacaacgtccgcgaaaaaaccattgaccagggccacgacaaaggaaacgcccccgacgccgaagatgtcggcgatttggatcagcgtgatattggcatattgactgtgccccagaagtcgccagtagaatccgcccaggggaaaaccctgaagacgctcggccccgacgaccaggatgggcaaggccaatgtcagcgggatgtttcgggcccggcagaatcgcaccgccagggccaggagaggccagagcagggcgatgtagaaacacagtccgacccagcctggaatggtgatcggcgcgatccagtggaggttgaccatccagtagacgaagccgacgacccaggcgaccagcgccattgtgcggggccgaaactccggcgagcagcccagcgcgaacgaaacgaccgcgatccaggcgagaaacgaccagtccactggcggctgaatcagtgtcaacatcagggcgctgtcgaagaacggtaccgaaagcagtaatagtctcttgattctcatgggtcttcttatcgtgatacctgtcgtatttgtccccgatgttgaacggcgggtcggcgaagatctgattcgcaagcggcttggtgatatcccgcaggattacgatgcaattgcggcggattgatgttgttcttcgattccagcatggccgccattctacaggctcaagggcccttggcaagggcaatcgtccgccgacagggggcctccgccgatcgacctgacggaaagacgtgtgggaaaaagatgtaacagatgcccttttgtcccgtcctaaagagtggaaggtttggccgatatcgttgccattgggaaaagcgaggtacacgcagatggactcaggcgtctgccaaaagggaggtccaaccatgtcgaggtcctttgatgtcaagagtggtcttattgggggtctgctggcgctgctgatcttgtccgccttgggtggcgcgccgtggatggaacgtgattgccatggtcgattcgcgatgatgggccatccgggccatgcctatgtcttcgataccctcacgggacaggtttggtccatgcgggtctatgacagccagtccaccgccacagagcggaccggcgataatgaactgcgtttctacgatcccaaggtgtacgtggcgtccgatcccaatagcctcatctactgatagcgggcctctcttccgtctgaaggccctgggacactgtctgttcggtttacgtaacgggaggcgacaggcctttctcaccgtgtcaatcgcttccattgcgcttgatgtctgatgcgaatcggcttatacagagggttgattcgtactgatgaactcaaggcaaggaaggaaagtctgtgtctctgagaaggtgcattattctgggtatggccttgtatctgtccgccggcgcctcggttctggatgcgcaggtggtggccgggccgctgtcggacgtgaacattcacctgcgggggccgtttcaaaacgcgcgtctccgtttcgagagggagaagaaggggcacgtggcctttatcgggggttcgatcaccgagatgaatgggtatcgccccaaggtcatggctgtcctcggacgccgcttcccggagacggagttcacctttaccgacgccggcgtggcctcgacctgctcgaccaccggcgccttccgccttcatgacgatgtgctcagccaggggccggtcgatctgttctttgttgaattcgcggtcaatgacgatcaggatgcgcatcacgcctaccgggagtgtctccggggcatggaagggatcgtgcgccacacgaggcgccataaccctcgcgccgatatcgtcatcgtctatttcatcaatcccggcatgctcgatacgtggcaatcggggcaggcgcctctctccgtgcgcgctcacgacgaggtggccaggcactatgggatcgcaacgatcaacctggccagggaaaccgccgagcagatcaaggccgggacactgacctggaaacagtatggtggcacccaccccgggcctatcggcaacacgctttgcgcgaccatgatcgaccgtctcatgtcactggcctgggacgagccgatccccatggggtttggacctcgcgatcattcaacgccaaaggcgctggactctcacagctatttccatgggcggctgattgccccgggtaaggccgaggtcagtcgtgatatggttgtccagacgcccgattggtcgaagctcaaaggggcctgccggcagcgttttgccaaattatctctgctgtgcgccgagaaacccggcgcagaactgaccctggcgtttgaaggaaccgctgtcggcgcgtacgttctggccggacccgatgcagggatcgcaacggtgagtatcgatggcgccccggccaaggcggtcaacctgtttcacgacttcagtacgggcctgcactacccgcgcaccgtcatgttcgatgccgatctggagcctggcaagcatgtgttgcgtcttcggatcagtgacgacaaggacgcgcgcagtagcggttatgccatgcgcgttctgcatttcgtcgagaatccatccccacgcccataagttcaaacattcggcaggagatcacagagtgagagatgtctcagatgagttcgttagtgagttcgtgaatgcctgccgcgaggcagggcagcgaggattgatgcgctgtagtagtggcaacatgtctcggcgtgtggacgaagagcgcatgctggtcaccgccacgcgctgctggatgagtcgcctgacggccgatgatgtggtgctgtgccgcatcgccgacggcgccgtgctcgacgggccggacccgaccgtggagatcaacctccacgcgggcattcttctggcccggcctgacatcgatgtggtgatgcattttcaatcgccctgcgccacaaccctggcctgtcgcgacgtgagtcaggtcaactattttgtgatcccggagatagcttactatcttggggccattgggtatgttccgtacctgcctccggggtctacggaactggccgatgcggctgccgaagtcatgcgtcaacacaatctggcgatcatggccaatcatggacaggtcaccgcggcacgcgatttcgatcaagtcatccagaacgcggagttctttgaactggcgtgccggatcattcttcagggtggcgatggcgtgacgcccttgaccgaggaggctgctgacgctctcatcgctgcagggccaggcggttcacgttcaagggtctgagcttcaggccgccaatagatatcagatggagtatcaagtgaagaaggttggaatcattcgttgtcaacagaccgaggatatgtgtcccgggaccatggacttcaaggtggcctcgcaagggaagctggcctttgaacatctcggccccgtggagatcgttggatttgtcagttgcggtggatgtcccggcaagcgggcgattgcacgagcgaagttgatggtcgacagaggcgccgaggctattgtcttggcatcctgtatctcaaaggggaacccaattggctatccttgccctcactacgccaatatgagagacgcgatcatcaagaagatcggcccagagatagagatcatcgaatacacccattagacgttcttcgaaagaggcgttgggaccgttcctctggtcatcgatgcgtggtccggacatgaggcttcaattcccttgccttttccgcgtggtgcccgcacaatggccttgatcgaagcagacgcggtgcctggaatcaagcagaattgatagcgtgtgcactgcacggccgtttttcaatgtagaagtgtcttggggagttgcatcatgcacgagaatttcatgctttgtattgctcgggtcaggcggcatggactgaagtccatcctacagcttgtcgtgtgtgttacggtgttgagcgcgacgggttgttgctgcaacagagaaaacaaggtggctgcgaagagggatcacatgattatcgaccgactggaaaacgccgagcgctattacgacctgcacccgggcttcgccaaggcgtttgcctttctgaagcaaagtgacctggcccgactgccggccgagcggcatgacatcgatggcgaccgcctgttctgttcgatcagcaacgggccgggccgtccccgcaccgaggccaacttggaagcccatcgcaagtatatcgacatccagtacgttattgccgggacggaggagcagggctggaagccgaccgccgattgtcacaccgtgcacaccccctacgatgcggacaaggacatcgggttcttcaaggacccgcccgagacctggaccgaggtgccggccgggtcgttcgttatcttctttccccaggatgcccacgcccccctcgttggtgaaggccaaatccacaaagccgttctcaaggtcgccgtggagtagaatgtgaatagcgagccaacgatggtcagcgttaggactctatgaggagttgcttgacgtgattatggagtttttttttggggggggggaatggccaacgccaagcgagcaactcccgtgccgagcagcatggggtccgtccctggtggttgagatctcggccgcaagcggatagagtgttacgcgtcttctgattagggcgtgacggagaaagcacatgtcgagactacgaattctacagagaccttaagactcggatgcaaacgtgagcagaagagacagaattacgtactatgacgttgccgacatgaattacgctagtttcttcctgacgggactcagcgagaacgagaaccagcgtggctacaaattgactgtgtcaagaagactgcctcctcgccttcgcgaacgaatgatggaggggaagtgggcaaggattgtgccctccgtgtgtgtgtttgagatgaggttgatggagaaggagttctacttttgcatcgacgggcgagatagttgcaggtcggccggagatattggcatggggtatcacttgcctcttctggacgaagtgaaactctacttcaaagtcaactacaatgaagaagcaatcaggacggatcccgatctgaaggcccatgccggtaagattgttcctatggctccatgtttccccttgagaccgaggcgcttactgccgctgttgggtaaaatagttggcgggagcgtcaccacggggagcgcgcgcaatgctgcgtcgaagattaagtcgctggctcgactcccaagtctcgaggagatgcaacgatttcgaaacgtgagcaaggagattgatatattcttcgttagtacattctatggacatgcttaccaccacgcccacatggagtttcgctatgaaatcatgaaggcaataagaagccacggcaatctggcgtctgtagtggggtttaccggtgagcctacggggaaatacgcgtcgttcaaatgtgaccgattccctctgcaagattacctaaatagcttgtccagtgccaaggtggcaatatatgtgaggggattgcatgactgcctgtccttcaagatcgggcagtacttggctcttggattgccaatcgccgggcagacaatttccaacaacagaaaagcattgtatggccatgagggcttctccgaacagtttgcatttgacagcccgagggagattgtgcgccaggctgtgcaactactgggagagcccgacaaacggaaatcgctgggtgaatccaactctagaatctttgataccaagttattcccccaggcaaccgtgagcgagatgttggagtgtctgagatctgatgtgtcctaggttcgttctgatcttggccacactgacactggtgccaaagcaatggtaacgggccgggatggaatggtcctccgcgttcgtcccgttgcgcatgatactgaaagctgagtcaacggtgcgataggcagggcggcagagtcgaggtgaagtggtagcggcccgagccgatggcgaatatggcgcagtggccttcggtgcgtaggaaggtgacgtgaggggattcggatgcgagtgtctcgccttccttgacggcggcggggtccagggtcgggagacaaaccgtcgcgctcgtgttggcgggaatggtcatgtgcagcgagagcatttggtccttgcgctgccacgcgctgtggatggtcccgctggccgagtcgtgatgggccttgacccaggtcaggtcgccgacgatcttggggtgaatgacgatcttcttgaatcccacgtcggtcgggtcgtgttgaatgcccgccaggtgggcgtagaaccactgttgaatatgccccagcatgcagtggttcatcgaggcgctggtattggcgtcccacgcctcgggcagggacgtccagccgcgatcgcggatgaatccgtagctgccgagatcgtgccgattggcaatgtcgaacaggacgtcgctgcgcccatgctcagccagagcctggacgagataggaaaagccgatatcgccggcggtttgttgatggttccgggtctggatgtcggccaccagacgctcgaccacggccggtatgtattcgggaggaaccagatcggtcaccagtgccatggcgctggaggtctgggggctgccctggttctcgtattcgtctcggtcgttgaaataggtggcattgaacttctgtctgatctgcttggccaaggcggtgtaagcggtctggtcctggtcttgtctcagcaattcggctgtttcggttacgatccgcgtgcagcgataaaacgtgaccatggcggtcagttcaggcggggtgaagcgcgccgggccgttgccctggccatgtccatagtcgtaccagtcgcccagacccgcctgcgggatcagatctttggatgtgtcgcgcatgtagtcgacgaaatgcttcatcgtcgcgtagttgtcctccaggattctccggtcgccgtaccgatgatagatctgccagggtagaatcacccccgcggcgccccattccggtgtgtagcgaaaaccgccgctgaacgcggggtagttgggggccaccgtgtagatagcgccgtcggtgccctgcgagtcgcggatgtcacgagtgacctttgcatagaaacaggcgatgtcgtaccggcatgcgattgagggctccatcaggtaacttacttcgagccagcccagtttttctcggtgagggcaatcggtcaggacatgtcccatgttgctgcgcaccgcccagtcgaccaggcgatggatgtcattgaacagggggttcgagcaggcgaacgacccgacggtggggcaggcgctgcgcacgtggcgggaaaccagttcctcgactaccggcaatccatctggattggattgcccctgaggaacggcgccggtgagctccaggtactgaaatccactataggtgaattggggcgaccagacctcggcgtcttggccgcgcagagtgtactcccaatagttgggtttccccacccccgcctggttgactcgacctcgcccatcgttggtgcgttcggtttggccgaagcgctgctcggccggcgtcaggcggagggtttgtcctggtctgccgcgtacctgtagatgaggaacggccgacgcgttctggccgaaatcgtagacgtacacgcccggttcgggctggtcgatccggacgggctcgaacacttcgtacgtcttcatcggaggggctggggacgcgatcaattttcctcctggtccctcggtgacctgcgctgtcgaccagtgtgaatcatcgaatccaggctcggcccagccgttcgccaagcggcgcgcgtcgtagtcgctgcccccgagtatcgcacagtgcgtgatcggtccatccgtcacacgccacgaatcgtccgtgacaagcttctgcctggcaccgtcggccaattcgatgtgggcctggaggatgaccttgggccggtgttgtacactgacgccatgaacacggcggtcgccgaccgtgttgtagaagcccttgcccagcatgaccccgatggcgttggcgccgcgattgagatcggccgtgacatcgtaggttgtgtaataagcggttttgccataaaccgaccatgccggatcgaggaatcgattgcccgccttgcgaccgttgacaaacaactcatgctggcccagaccgcaaatgtaaaccagggcgcgccgaaccggttggttcacggtaaacgccttgcgaaagatgggaagtccgcgtgacgtggccttgtcggacggattactcgaatccgccgggtgcaggatccaccgcgcgtgccagtcggccggttgcagtaggcccatggtccaggtcgccggtgtgctccaggctgaagacgcgccatccccgtcccagacccgcaccttccagtacacctgctgagaggagatgagcggttcacctccataggcgatcagatgcatctgcgagccggtcactctgcccgagttccacagatcggttgctgcttccgtcaatgcctcgatcgacgtggccgctaaaacctgataggcggcttggatctggccccgctcggtcgattgcagggtccaactcagtcgcggccgcgccgaatccacatccaatggattcgggcgatgttcgcatcgcagcccgttcaccaccagattcgcctcggcagcagcgccggtgaccagaagtgacagacagaacgcgagccgaacacctcgccacctggaaagcagcatcatatttcgtgcctctcaaacgatatcagatcacgattcgttactgggcgggacggggacaggcgtctacgaactggagcgattcttcgatcaggatctcgccggtgttctcgcccagagacgtccgcgtgatatactcgtaacgctcgaagctgtcccagtcgaccttggccaggatgtatccgaaggcgtcgttggtcaggccgaacaggaagttgtgttgcccgtgcatcttgcgtttgaggtaatacccgatattgggcatcgcttcgcccgggatggtcagcatctgagcgttggccaaattcacgacgtttagacgcgtctggatgttgtttttgctgtccagggcgaaacccaagggcgacaattggaccacctgtcggagcatctggttctccaccggaagcgtgacggtcttgctgtggcaggacaacttcgggttactctggattggagcgctgccggcgatgcgcagcgcctcgtcggccagacgatggccaatgcggatgcactcgtcccacgtttgaatgtccttgccgttgggaccgcgacagtcggccgtgaccatgccccccagggcgctgttcatgaagattccgacgccgcctccttgtgcctcgatccgctcatatagcggtcccacaaaatccgggcagaggatgccctggtcggccccgatcacttccggatggcaggcgtagttgacgagggtcgccaccgcgttgtgctctgagtcgagaacctggatgacatgacagcgcgggtcgtaaagccgttcggcgtagtagttgtacgcgatcttgccctgggcccggtcggtcgcgatgcggaccaccaccggttgtagcttgcccactgcctcgttgatcgcctcggccagtttcttgcagacgtcgtcgaggtagtccaggtcgcaattggctttgcccgttccgtcggggaacccataacagtcgggaccgctgtggttgtgcgtggccccgatcaggatattctcggccgggatgccgggcacctgcctgtggaccttctcacacagcacgcccgggaagcccaggaaatccgtgctgcagattgcgacgcgtgtgccatcctgttcgagcacgagcgcacggacgtttaaccgtccaatcgttctggtcgcggtgtgggaagggccgaccccgccggaaacaggcagcggcttctcaggtgtcacgtcacgaactgcgatcgctgcgcgaaacgctccgaacacaggacccgcacagagtacgctcactagcacggctgcaaaaagaactgtcttggcgactcgccggaactgttcggtcataatcctattctcccaagcacgatgatccctgacattgtggctccgcaccgttaaggttaggttcctcagaactggtccttgagcgggatcatccacttgggccagtcggtcgactgtacgccgcctggtttcgtccagggcccgttggtgtcaaaggatttgctccacttcagggtccacagttgcttcagcgcgattttgcgcacggaccagtcggcgaagaggacgaactgggcgccgccgtggcgattgacacagagtgttcgcatctcctgaccgcctatgatcggtgtttggtggccttgcgccggaggttcgtcggtgtctcgaggccagccgtccacccaccagctttcggtgaagaccggaaccctataggcgcccttgatctggtacgtccgccagtaatcgttgatcggtccccgtccccagaggtcggacaggccgggcctggggttacacatccagccgttggggccataactgcccacgtcgccgccatgggagacggggacgcgccaggcgtcgaacggttcgctggcaagggccatggcgtcttccgaggcgccgcttcggtgtttccgggccgttgggcacagccacatctttttgtccttcgagagcggtcgcatacattcccgccaccagtctccatgggcgacatctcttccaaagctcagcaattgtccgctgtagaagttgccgttattgtcatcgcagtacatcgagaagatcagaccccattggtgcaggttggatttacagcccacgccgcgcgcctgacgccgcacccgctccagggcgggcatgagaatgcccatcagcagggcgatgatggctattacgaccagaagctctatcagggtaaaaccgctttgttttcgcatcgtcacactcctatcatagattccgctgaaagcttcatagaccctatgatagcctaacgaggcatgacaatgcaagtgatctgagcggttgaggtcaactggccaggatcatgccgatgatggcgagtgtcccggagatcaacatactgatcaggttgtcgttattctgttccatctgagcactctttcgactccttttctctgagagtgctatgcgcggaggttccacggagttctgcgaaaatataggatttgtgagcgttggatggattcgtacggaaggttggggccagacgtatcgaaacgggggggcgcaagaaaaaagggacgcccatgcctggcatggacgtcccttcggggtcagtcgatatgggtgggattcgtcagagtttctccttcgaatcgcccggtgcggccgggtctttcttgtcgtcaaccggctcactcggtccagtgagatccaccgatgccttggtgtcatcgcacggctccggtacggtgaagagcatgaacgacatgtcctcactgacgccggtctggtcgtagagttcggtccactgccacgtggcggtgaggctgtcggtgcgcggctctgtcgccacggcgtcgtcgttgcgtcccgctccaaccagggtcaggacatcctcggcgcccagcgtgatgccgaagatacgcacatcgtccagcagtccgttgaggaactctgcgttctcatccccgcaaccgccgatgatcagcgtcgcctggaccggtgcgacgaaaccgcccgtattcgtggcggtcgcatcgaggacaccgttgatgtagagcttcatctgacgtgtgccgccgtcgaacgtggcgaccaggttgtgccactggttcgccaggaggctctgcgtcgtctgccaggtgttcaggcccacgcggaagtggaagcggccctgggggtcgatccacagaccgaagcgattgccattggcgcttgtcctgtcgtactccatgatggcctgccagccgcccttggtctgtcgggggttgacccaggccgagacggagaaggagccgggggccaggtcgaggcccttgggcttattgaccttgatgtagtcgcggtagccgtcgagattgagggccccgccgagatagccggcgccgggctgccagagaggattacccagcagggcgccgtcgttgttattgcccgagctgtcggatgccgtggtgccgctggactcgtccagtttccagtgggccaggacatcagctccggacaggtcccacagtttctggggatggttggtccagccccagggataggcgatcgtctggggatcttcatagaccgccacgacgctaagccagtagacgtcgcgggcgttcctctggcagaaccattcctcctgtggcaggcgaacggtgtagcgatataccggttcgtggccttgcgtcactgaactggtgatctgaggatgcttgtcgaagccgaccaggacctcgtcgaaatcatcgacgcggtactcccagattttctgggccggataactgaacgtggccgggttggccggtgtcgggtccggcgcgtccgcccagatcgacagcaggaagtagtcgggcgcggtcggtggcgccatctgcgtgcactcgcacgctcggtaggcatagccgatgtaggagccccaccaggacaggccggtgatcggcgtcgggctggtgcactgccagtcgtcggcgacgagtcggcggtaggtcaggccggagcccgccttttcggtctcgatctcgaaagccaggtcggccgatcgtgaggcggacggatgccctttcgggaatcgcaactcgccccaattgccgccggcataaggttcctctgccagcacccacacggcgtcgtcgttccagtggtcggccgaagccttccatccgaagcgggtcgctgtgctgcccggagcgtggatgaggtaggcctgagcgcacagccagtagacctttggctggctgggcgaaccggtttgctcgaaggcctcgtgggcgtcgatctggaagttgtacttgtacatggccaggtggttgttctgctcgaaggcctcgttgcacgggctgtagaagctctgagtccgcgcctcttgcggctgggccgtgaattcgcccggtttgaagtctttgcgccacagcacctcacccggcatgctgtaacccgtctggctgcgatcggccgagatgtcggcgcgaatgctgagggtgaatgtcacgtcctcggcgttgttgttgggcagaagatcgtggtaccacgcgccccagagcgagatgcccgtgatggggccgctcgtggtgcactggaaatcatcgccggcgatctgctcggaccatgtgggcgggatgtctttggtgatgtcgaccgccatgccgttagtgctgatgtccgggctctgcgtccacttggcccccggcgtcgatccgctggttgccagcgactcttcgtcctcgtagtgggcccagtgacgcaggcccgtgaagggctgctcccacttgatgaaatcgggatcggtgtccagttcgaaggccatgtcgtacatgtccagtcgttcgcagatgagcgaattggtgatcggctggaccagtccggggtcggccatgatgcccggccgtagttcgttcttgcggaattcgaaaccgatcgccccgtccatccatggctggggacgcgtcttccaaccccacgcgtaatcgggctcgggatatccggtgtagaccgcggtgatgctgatccagaagacgttgtcttccgtgttcttgtcactgtaggcaccctgccagaaatactcctgttcgtcgagatcgagcaggtattggaagcaggtgtccgagggcttgccggggaactcatcgagcccgacgcgttcgatttcgacgcggctggcggtggcgctgacgacccacagcaattggccgggccgactgaacgcgtatggtccgccggccgggacgttgctccagaatccgatgcgccaggacgcgggcttggtttgcggcggcgcgtcggcgttccatcccaaatacgagccccaccagtggacggatgtcacgggcatggcgccggcgcaacggaaattgtcggcgacgagtctccagttgctccacgcatagtccgaggcccgactggtgaaggccggttcgtcccatccgcagtagaccggtacgttcgaacccggcaaccattccagcggcggttgggaccatttcagatgctcgaccggtggcttgctcggtatgaaaacgtcctcaatgctcacctgatggtcttccacctcaccgtccggggccggaccggtatagtcgagaccgcgcatcgtgctgaagcgccaccgcgagaatgtcttcgtggacgcggcgccggccggtacgttgaacgtcagggtgttgacccctgaagccagcggtcgatcgatgaagatctgctcgcccgcatcgtcccagtcgttgtcgctgttgaaatcgatccaggcgttgagcacgccggtggtggaggcagtgacctcgacggtggctttgctgcccggggccaggacggagacgaagacgacgccgtcctcatcgtcgttgctatcgctgtcgtcgccggtagccgtgatgtccggctgcccgtccgggtcggcgtcgacaccgcggccgagatagacgcggggctcgatcatgtggcgggcgccgtcactgatgtgcagcgtcggataaggtcgatccggggcgtcgccgaaatccatatccaccgggggcggtcccgtgatgaccagcgagagatccaacggctgactctcgtacgcatgccccccgggataggccatgggcatccacccgagggtgggatgcagccagacggcgctgtcgttccattgcagttgccgctcggaggttttccacccgaacacgtagctggtgtcctggctcgggacctctttgatttcgagccagtacgtggtgccgagtttctggacgaagagttcttcttcggcctcgtcgaagcagatgttgtattggtaggcccgtttgtgattctcgggctcgtagaatttgctggccggatcgaaccagccttcgggaatgttgttggtcacttgtgtcacatcatagctgaacggcaggatctcccgggtccagagaagcactccggggcggctccacgggatcaggttgtccgccggtcggtctgaatagatgttgatctcaaaccgcaggctgtcgacccccttgaccggcgtgatgtcgtcgaggaacgaggcccagaaatggacgtccaggatcggaccggtctcggcgcaacggaaatcctcggccaggctggtccagtacatgtccacgtccatgcccgtcgagcgcaggtcgggcaactgcggccagtgcatcttgtgcgggtccttctcctgccagtcgcagaagaccaggggttccttgacgtggaggagatagtcttcggtttcgccgtcgccgaagacgccgtcaccgttccagtcttccggcacgggtcgttcggtgatcgagaggcgagcccagacgtagccgccgaagggacccagcttgaaactcggaggggtcaaggccgacagcggaccgtcgtaaccgttgggtacagggaagttgaccaggacgtgctcggggctgtccccctcgggacatggcacggcgccctgccatttcccgtcctggttccaatcgaccaggaggtttacgtaggcgtcccgtacgatcggcagccggttgtgaacctcgatatcgatatgattgccccagagggcggtcaggcaggcgttgggcagcgattcgaaaccgctgaagatcaggggccagacctcttcggagccgacggctcccttgatcgtataggcgcgtggtttgagcaagcccgcatccccgtcctgctgttcctcgtcgaggttgtaggtgttgggattgaaggccggacaagccccggcgttgccttcgagttcgatatccaccttgggtccgaagtagaggtagttcgtgtcgtgctcgatccaggcggccggcccgacgccgacgcatgtggggaacaggccgactacgccggaggccggataggccagcgccccttcgggcgcatcgccgaagtctcgttctccgagggggccggtcgggtcgtccttctccatgcactcgtgtcgaatacggccctcaacgctcacattcgagccgcggatgtcgattgaaacccaagccgggcagaatccctctatctcgtgggaggtgttgatgaagatggattgctggacatcgcgtcgcggtacgacgatgtgccgttcgatcaactggttttcgtggctcaggttgatgatatcatacggtagcgggggagcggggtcccctgggtcggaagaccactggcccgtcgtccagttcaaggcgacctcgacggaactgccggttgccgcggccggattgaggacgcggaaagtcaggtccacctcaatgactttgcgacgcgtgctgtcgtagcggccattgaagaaccactgattccaccagtctgtctgggggtagtagaaccaccctccctggtcgaatccggtgccttgaccggcgacgaagtgcccggccgaatcgatgtccaccgagaacacgtcttcgaccgccccggccgagccgacgcccaggcccagcgccaggatcatgaccgcgacaacataccttgaaaaccttaccttgaacccgctcatggcatacacctcccaaaaaatgaccttacgcaaagccagcgcaaccacccgtcggggacgagcgatttgactgcacacttacagcgcgttgattactttatagttccactgtgcaatcgacttgtaacggtatttcctccaacaaaaagcaggtaacggacgttaaaatcaccaccactccctctcctaatgtcatcccgagcccaatctagacgcagtgcggcattatttggggttcaaggccgactttatagggcggtgtttttcccggacctgttgtctcagcgggttatcgggcgtgttttgccgtcccaatgcacgtttgaaccggtatcgcagccaccagtccgggcagggcgcaattctcgtttttccgggaccttgccgacgtgaaaacgggctgatttcgacaacatcgccgataatatcccctatttcagggccctgtcgtgggccggaaacggacggtaacggcatgaacgaccgtgttttgtgtgtgtttcgcttgtacgttagtgatagcaggctgtgtttgttgtgtaatatgcctaatttgcctggggctgggcgatttagtcaaaaagaggggctttactcgagggcggcgcgggattataattccggcattagtcctcggcggcgccattgctgagggtaagaagggaattgcggcatgcaaaacatggaggtcctcacgaccaggaatccacaagcagtctcggccagggcgggcggccccgcaaggatcgctgcgctttctcgatgtgcgtgcaaaggcctggcccatccagcggaaagggtatgagtatgcagacaatcaagacgacgaccccagggtccgactcggacacgagcacgtcatcgaccaagctgcacccactctcgaatcggatcgtcaagtggtatatgaacctgccggtcgatgcgaagttggcggtggtgctgtttcaagagatgttgcgggccgagaagcagatgccggatcgctacttgggcgaggatatccgcagcaaactgagcaatcagatgaaggatgagaccatctcggaggatcgcggcgaggtctcgctgatgcacggcctgttcctgatgatgcagggctgggacacctagatcgggcccgtcgatgggggccgcctgaacaagccccctttttccgttgcatcgaaaggctacggcttttcgtcgagccagtcggaggccgccagcgcgagattatgcaggtccagagcggccttcacgtctccgttgtccggttcaggtttctgctcggtatcgagtgcgccatacgtggtcagttggaaggccatatcccaggggacgccgctgccgtcttcgacggggaagccttgtagccactgatcgccctcgaccgggggccacggtcccggcgtgacttcctggatccaggtgcccgtctcgctgaactgatgcgttcgcgtcagccagccccacgtgtggttggcgcccggccccttcgtgtcgtagatagcggcgatgctgatccagtagaatggctgctcgccgtctttggacgtcggctcgaggggcggatggaaccactggttctgtgagagcggacaactgaactggaagcacgtttcgcccaaccccgcgtccttgccggcttcctgatagcctgcgatggcccaggtccaggcggtgcaatagttttcccagatcaggacgcctgggtggccgaacgtgtcgagagggcccgacccggcatgggggacgtccgtccagatgccgatgtggaagcccagcggctgtaccggcggcaggtgggatgccgtccagttgtggaacgcgccccaccagtgtatcccggtgacaggctggccggcttcgagttggaaatcatcggctgcgatctgatggaggcccagcgccgacagggcggtgacgccgtcgaagagatacggggtcgtcagggcaatcgccgccggtggctggttccattgcagggcggtgacaccagaggtcgggtaaggctcgaagtgccgggtgatctggacggcgtagtcttcgacttcaccgtcggaggccgggccgtcgtagctgagcaagccacgcgaattgaagcggaatcgcgcgaaggtggtgccgaccagggcctcttccgggacggcgaaggtcagggtcttggcgccggttgtcaggagggcgtcggcgaatatctgctcgttcggaccgtcaaagctgccgtccccgtcgaaatcgatccacgcgttgagatagcccagggtcgaggcgacgacctggacgctggcggattcgccgggctccagtagggaggtgaatgtcacgccatcctcgtcggcgccgttgttgtcatccccggttgccgtcgcatcgggctggccgtcgatttcgctatcgacgcttctgcccagaaagatgccggagaccatcgtgtgccgcgctccgttgtcggccaggagcgtggggtagtccggcgcgtcgccgaagtccgacgagctggactgcttgatgcagtcggcgcaggtgcggccctcgcccagggcgacgtaagaatcgacacagtcgcctccgaaggtgacgtagcaatcccccgtggaccaacggcaacagatccggtatcccggatcgccgtcgtccgggtcgccgcccggctcggtgccgtccttgggttggcactcgtgccacgcgccgcgatagatacgcgcattgcggccgatgatatcgatggagatccattcggggttgtatccctggatcgtgtagccgcggaccggctcaatactctcgaagttgcccagattctccaccagatagaaatggtggtcggacatgtacgtgacttcctcaaccatggtcgggacgtcggtgggcaggggaggagagcccgtatccagggccgaccattccggtgtggtccagttgtagtggatctccacatacgacgtcttgctcgggtccaccggcatgatataggcctcgaaattgagataccccttccggtccggatcgtagacgccgttgttgaaccacatgcggtagcgatcgacggtggggtagtagtaccagcccaggccgtcgccgtcgcccatgatgcggttgccgtcgtcgtcgaaggcgatgcgataccagacccccggatagtggctcgggtcttcgatttgggcctggaggggtgaggatgataccgtcagggcgatcaacagggcccacgtcaagaggaatccggatctcgggcgattcatgttcacactcctgtgccaaggtttcgtgcgcgcgcaaagacgctcttctcttcctgagtgattcgtgcgccgatgtccctctcggcgatgcaccggcgcctcgaccactgatgtatgccatcgacagcgccggcttttgggtccagcaaaaagcgcggaaatgcggcgaaaaacgcgtcaccgacctccgaaaagaccccctgaacaactccctataccctatcagaaacgcccactggattcaatgaggaaattatcggaccggttttccggcgatgttcgggcgctcatccccgccccggcgaccccggatacgccggggcgggggcggattgttcctcacattgcctcgtcgaactcgtcccggtaacgggcgactccgccggcgcgtgatttgagggacgtctcgaagaagaggatcaggaaggcctcgtccggcacacaccctcccactggctccggaggtggtaggcgcaggcgcgctcgaagccaaagcgggggtagtattccggatgtccgagcacgatgacgaaggggcatgaccgctcggccagcagatcgatcccacgcttgaccagggccgagccaatgccctgacgctgtcgtccgggctgcaccgccatgggcgccaggcccataccttcgaccagtccctggtcggtctcgatggtcgccgggctgaagagaatgtgcccaacaatctccccctcgtccagggcgacgggcgaaagcacgccggggcagtttgcccggatcttctcaacgatgttcgcctcttcgggctgcccgaacgcctgctcgttgatcgttcgcaccgccggcgcgtcttctggcaattcctcgcgaatcacaatcattcgcagctcacctctgttccctagtttcctgagacgatgtaatagcgcgcccctttgcttgtttcgagaacgtccagacgcatagtcaggttgtggattccatgggtctcgaagtaacctgtccccgcgtagggaaccgtcttcccgtcaggggcgggttccccaaagacgtataccgtattcccgtcgtttttgcagatctcagcccagtttagcgaggccgtcccgggccataggatatgcatttcatcgtagtctttcttcatccgcgcgttccagaaggcttcacatacccctttgggtgactcgggccaatgttctcgcttccctatcaggtcgaaggcctgggctcttgcctgcgcaaatgggtctgtcacgcttggcggggtgacgctattgttggtgcccgtcattctcagcaagatgagaactccaacggacaggcagacacaggcgacgctggcgagaaacatggctgtctggggcttcatcttcatgatacacctctcagtctggaggatagagggggcttcaccgatgcggttaatccgttgggctgaaggacgtaaggaacagttctttggccttgtcgaggccctcttcgctcatcgctacggatttggccttgcccttggggtcggagatgtagcctttctgatgcaggcgattcatggtctcccagtcgaagctcttccaggcccgcgcacctgagcctttgtgttgttcccacgtcaccagataaagaagcgccaacgtgtagtcgtcaaccttgtcactgtcatagtccatcattggtcctttcgtcgcccaggatggttgccaatgacttgcgaaatacggtggcctgacgcatcatgcccacatcgttgggatgaacgccgtcgaccgtgccgtcaccgtcggttcccagcatgttctcattggataggaaatgcaggttcgtgatcccttgggatttcagctcttcgtagatcgtccgaacgatggcccctttctcggtcggtgtcgtattgctgacactggaatcctcggcgagcaagatgggcgtattcgggtgagcctgacgcagtttcttgatgaagggctcgacgcgttcggcgaccatctccgaagtcatgttccagaggcagtccaggacgtagaccgccgggtctagctcggccaggaggttggccatcgccggctccatcttgccattcccggagaaaccgaggttgatcaccggaacgtcgagctgccgttgcacgatggctgtacacgccatgcccgggcgggaggcgcatccgccttgagtgatggatgtgccgtagaagacgatcggcgtgctgtgtttgtggaaggaccttaccggcctcgaaagggcattgtcctttgggattcctatctctatggtcttcacgccattgtacagcggaagatagagcatgcattccgtctgctgtgtcaccgcgaacgaggcttcattcgacaccccgagcggtcgaccgttcttgcgaaagacccacgcgccgtccttgttcctggtatacaggtcgattccgctgacgcccgtggcgggcatgtggggcatggcaaggtttcccttgcgaagggtccagcgaatcttgacagactttgcatccgtcgcgaagtagacgcacatcccggccgaatggtggctcagactccaaaccgggggccgaaccgtctccttggccttggcgggcagacgatcgtagtacgattcggtctcctcccagcccttgccctcgattgcgagcagttggccgtcgtaccacaccgtgttgtcacaagggtcctgcacgccccggcgcgggtcgattctctcgacagcagcggcgccgagcgtaagcggtagaagcagagctgccagcaggcaatgaatcggtctcactgtcgtttcctccaagtcaaacaaacgaactccaaagcgtttctcgcgaagccatcgcgcctcacttccgtttctctatggggaccgcctcattggctgaagcccccgaggttctgtctgtgcgcgggccattcggcaaaggcaatgtagaaaggtagaacgatgttcgcgatggggacgagcatgagcaatgacagggcccccgggaagcccgccttcgtgcaaatcttccagaacggaagcacgttcaacaggatcacaacaggaaatattcccgcgatcacgagcatttcataaaatcccggcatggtatttcctttctccgcttcaagcctatgtctcagttgtcacgggtgttgcgcatgcaacaccctgctcctacggcgtcatgttacacggaaccggtctgcaacgccacgatgatacgtccgatgcggagcatctgcaaatggctttccgtgtcaaatggcgatgtgaacgggcgtgatgttgagggccttgggcatgtcgttgggatcgatacggacgagcaggccgcgatgacccgcgttgatatagatgcagtccagatcgaaaatgctttgctcagcgtagacgttcatggcccgccgggttccgaagggactggtcccgcccacctggtagccactatggcggtcggcgaccttcggttcacacgacgcgaccgatttgactttcaaggcccgcgccagttgcttggtcgagacctcgcagtcaccatgcatcaacacgatcagcgggtccctggtattcgtctccatgaccagggtcttgattaccgcgtgctcgtccacccccagttcggccgaagaaacaccggtcccgcctttgtcgacgtagcggtacgtgaagacttcgaacgggatgccatgcttgagcaggcaacggatggcgttcgtcttgggataatctttctttgccataacggaatcaatcgcgtgcggtctgcacgttgccttgccgttcctccagaatcactctgaggggaccggaatctcaacgttttcagagacgggatagcccaagcaaggctcgccttcgacattccatgtgaagcgttgcatgcgggtgttgcggttccacccggcgccctgatgcttggcggcgtgatagacgatccaatcttctctgccgtcggggctcttggtgaagcaggcgtggcccgggccaaacaccgtttttgttgagctgaagacaggcgtttcctttttcttccatgcctcggggtccagcgggtcttgtcccaccagcttcaattgaccgaggcaatagtcgtcggtccagcttccactggccgaatagatgacaaagatgtcgccattgtgcttcaggacttccggcccttcgttgatgaggggacgacctattctttcccaatcgtgctcgggttcggagatgagcgagcgcggcccgtcaatcgacaggggattcttcatggatgcgatgtacaggttctgccgcacgttcgcatcaccttcccagcccgaccagatgaagtatagttgcccttgatagtccaataccgtcccatcaatggcccacttgtccgatgggtcggtgatcttgcctttgaggatgtaggggccggcgggatcggccgtggcgttctgaagcacgtacatgcgatgattctcattcttgccgtcatcggcggccacgtagatgtaccactgccctgcgagcttgtgcagttcaggggcccacaattccctggagtaggcctgcccgggttcgggacgccagacccgcttgccggtgaattggacggcctcttgaatcgtccggctgcggttgacccaaatgcatccctggtgagaatagcagtagtaatagaagccgctgtcctggatgatccacggatcgtgaccgtcgggggcgacgggattggtcagagtgcggggggcgcctgtcgcgatacttgtcccgcacagaccggctgccgtcagtagagcaatcacgagcattctaccgtgttggatcatgaagtcctttccgaatctctggctgtggcaatcaacgaacagacatgataacgcgtcccggccgaattgcaacgaccgcccacgccactcgttcgccagcgggcgtgggtcgatgaaaatcgcgtccgtttcgttgcggtcgtgaacaggccggttataatcgccgtacggcaggggaatggaaaggatcgaaatttggatgtagagcctttagcagtaaagcggttgcccatccggctggccgccgacccggcgctgacgattactcggctgttctgggccggtcccgagcgggcccgcaaggtgatcgaccgcgttctggcgctggacgaggaccaggtggcgcgcctgctggcttcgaccatgcgggacttcgaccacctgcacatcgacctggaggacatctttctcgaacactacgagcaggtctcgcaacggatccagatgccgactccgccgacggtcaagagaatggtgctcatcggcgcctactttaccctggaatacgcctttgcctcctcggccttgttcaacccgtccatggcgcccgccatcggtcaggaggatctggaaccggggtctctacgcttcgccatgagcctgcgggcggtcggcgagggccatctcagttcggtggtgtttcgtcggggagtgatcgattcggccggtgatatcatgatggaaccgaccgggctgtttcacgagccctcgcgacgagtcaggaaccgtcagtttagcaaggccaagtttcgtatcaggctggcccagatggggatgcgtgacgcgatcctggaccctctgttggagcgactggacgatccgttcacgttccaggacctgctgcacatcgtcgatcgggttcagacgcaaaccgaagcggcctcggcgcacgatcacgaagcccacggcttcgaatggctcggcgcctgtgattacgatatcgagagcgcagccggcgccgacatcaccgaactggtgctcttcccgatcagcgaggccgaatcccggggtatggaggacatgcgcctggtgcgttttgtcgacgacgacgggtcgccgcgctactacgggacctacacggccttcaacggtcacgagatcctgccccagatgatcgagatgccccgtccggggctggcccatgtccgcacgctgggcggccgctgcgcccggaacaaggggctggcgttgttcccgcgccgggtccagggccggtacatgatgagcggccgcatcgatggtgagaatctctacatcctcaagtccaacaacatcctgctctgggacgaggcggtactggtccaggagccccagttcccgtgggagttcatgcagatcggcaattgcggctcgcccatcgagaccgaggccggctggctgctcctgacccacggggtcgggcccctgcgccactattgcatcggcgcgacgctgttggatcgcgaggatcccacaaagctgatcggccggctcgaacgaccgctgctgatccccgaggccgacgaacgcagcggctacgtccccaacgttgtctactcctgcggcggactcgtccacaacggtatcctcgtcatcccctacggcatcagcgacgccgccaccgggttcgccaccgtccccctcgacgatctcctcgcccgactcgcctgaccgcgagacgctactgctctgcgaaatccatttgggtgggctgtcctgccgagaacgtcgcccatttactgcccaggttgtccccggaagactcttcgaggtacaccatgcgccggcctaccggcaatcctgtcggttgcgaaatccacctgggtggcctgtcccgccgagaacgtcgcccatttactgctcaggtcgtccccggaagatgatttgaggtataccatgcattggcctatcggtaattccgacaacttgtagcatccgttttcatcggtcttcgtgctccgcctgacgacgggacaatagctgtgctgcaacttgacgtcgtcatcgtgggtttttctcacctcgacgcgcagccccggtctcggcaggccctgtttgtcgacgacgaccccaaaggcgctggcggccgccggcaagacgatctgggtcggcgcgtcatcggcggtctccaactcgctccacgggccccagtgtggcgcgaagcccggcgcggtcacgtagagatactcttgatcgtcgcttaccccggaaatgacaaagacccccgatgcgtcggttgcaaacttttgccaatgagccggttctcgacgctcgctcaatgcgactgtggcgccctcgatcgggttgccctgtgcgtcaaccacgacgcctgcaatcagggtcgccgtcttgagtcggaacaccgtccgattcgggtccggcgatatgggctgtaccgctacagggtccagcaccagcgcatcgtagccttgggcgagcaccgtcattcggtatgttgcgccgatggggaaatcttcctcctcgccggtgtcgaagaagccttgcgatgattggaagatgaccccttgccgattccacagcgctctgtagccgtacgttggttcgtccaccttcgtagcgctcagcttcaccatgaacttagtgatcggttcaccggtcgcatcggccaggaccttcccatagatgcgcccggcccgacgtacgacgacgatatactcgcctttgccgagttcgaatctttggatttcgccggagataccgccaccgaacggattaagacgaatcgtaccttcacttggggcgttggggatgatgaaccatccctcggcgtcactgacgtaccgcttgtcgtcgaggtttgaagcgtcgtcgtattcgtgaatcgccactttcacacccggcacaggctcgttcgcgtcatcgacgatccgcccatgcagcggcacgcccacgtcaagctgaatgtcgatttgcgcttcgcttgcatcttccaacagctcgaggcgctgtacgtgcagggcatggctcgaatgcacggcccagagagtcagtttgccctgatccacgttctccaaccgataccagccttcggcgtccgtcttgctcgtgaggcagttccacatacaccgggaattggtattgccgactgtcaccccggccaggggccggccgttcggatcggtgacgcacccgtaaatgttcactcctggcttgagaatcacgtcctgatggactgtctggcccgcggcgcccggtgagaaccgctgtgacacggcgggatagtccggatgggtcgcgtgcagagaatacgtgcccacgaccgggctgagaccgtcaatctcaaagcggccatccgctcccgtgacggcggggcggttcgtgaagaagaacgtttcgaccgtcgccccggcaatgggattgccttcgggattggtgactctgcccgccagacgtgagccgcgatccagttcgaccaggatcccttcagtcacctgacctcggacgataggagtgacgattcgctgcgatacataaccgtgggcgatgacgcagacgtagctgcgctgcatcgggtaaaggcctgtgaggagaaaccggcctgacgcatcggtttcggcgtgggtgttggaatcggacacttggtatccgacccgcactccggcgatgggcttctgggtcagcttgtccagcaccatgccggcgatgccggtgacaggctcctgcggagtggttggttccgttggaaggacactgggcttggcagcgggtgcgttgggctcggtggtctcgatctgttccggttccgcctcggccagtcgctcccggatggcgtcgatggccttttggaaggggttggcgttggggtcgccttgccactgggttgcgaagggttggagggctgcaatggcggacgcgtcgccgatttggcccaggtactcggcgatctttgtttgagtctcgttcgtgcctctctggagtagggacaccagccccgcgatatcgccttgctcgtagagggtccgggccagggccagttcgtcttggacgcgatctctgtctttttccggctcgacgaccggcctgtcttccacggcggtcggttccggcgccggttgtggtgcttcgcgaccgatgaggtggttggccaggatgaagatgccggcaatcagtgccgcggcgaccgccagttttgtaatcggacttctcatgatccgtctcccgaactcgatcacggcgggcagtcccgcatgcgatggagttctccgctgcgctcgccgggccagcgacgccaaggcctgggcgtgggcgctttgccacgcggcaaagtccggcctgggcggttcgcctggaaccgttctggcgatggcgtcgtccagccaattggcctgttcgggacgtttcatgatggctgtccttcaggatacccgtttttcttgagcgtccgttcgatctttcttctggcgcgaaagagtcggcctcgcaccgtatggcccgcgatacccagcgtcgtggcgatctggcgatagtccatcccattgtagtagtgcaggacgacgatttcacggtacatcggcgccagttgatcgaccgccgccttgaccagatccaggtccgaaccctccgtctgcgacggatcggcgcaggccgtctccatcggcggtggtggggcggatcggtggcgatcgcgaatcaactgatgggcttcgttccgacagatgcgcgccagccacggcctgaaccgatcgatacgcttcagatcgctcagcttctcacaagccttgacgaacgcctgctgagcggcgtcttcggcttgggttcggtccagaagaatcgagtaggccagccagaccatcgtcgcgtaatgacgctcgtagagcgccccgaaggacgcggcgtcgccccggcgagctgattcaacaatttgtgtttccgtttcccgttccaacgttcggtcaacctgtaggcccactcactgatcagtgacactctatagatacacgggccgcgcgaaagtgcgcagggaaatgcccggagtcgagaaaaaaccgctcggagggtaggagacgcttcagtgcgtgccggctaccgctttcccttatccacttctcacgacctcaacagcggcctaaccgccggcgccatctggcacttctaaggtcccgccttgaggaagctatggcggacgggctgtttcttcagttcggcctgggtgggcagcagttcgaaggactggacgtgctcggtggcggtgaagtggtcgagggtgcgctggatctgggccatggtgcggccgtggagcatggcgaacaggttgtacggccaaccctcgaaggtctcacgctcgtagcagtgactgacggtgcccgaatgggccagccagcggccggcctcgacgatatgcgcttcgcccacctgggcggcgaacatgacgttggcggcaaagcccagtttgtgatgattcaccacggccgccaggcggcgcaccacgccacgctccagcagttcggtcagcagggcgaacatcgcttcgagttccatgccctcgggcgtcacggcgtcgaagggacgcgctgtcaccttcaggcccccttgcagggcggccagcacacgccggtgcgcctcgtccaggtcgacggcctcggccttgggtatgcgctcgacgtcctggagcaggacctcgtcgtcgctctcggcgtcgaagcgcacgtcgagtttgaagatccgcgtcacgggcagactgtggaaatcgatgccgaacttcgacgccagttcgctcagggtcgcctgcacctgggcgggcgacgcctcctgcagcgtgaaccacatattgaagcggtgctggcggaggtagttgtgcgagacgccgggcagggcgttgaccgccgtggtcacttggggcagttggtcttccgggacgtgagcggtcacgagcgtgctgctaaagcccagggcgcgatagttcaccacggaagcgaggcggcggatgatgcccacttttttcagatgtcgggtctcggccagcacctcggtctcgctgctgtcgatatccctggcgatctcggaaaacggctgtggacagagcggcagcccgcgctgcaggcgattgcacaggcgtttctggaagtcggtcaactccagactcatttctcctcccgaggctcgtaccagcataccggatcttcggccaggtagtcgcctgtcatggtgtaggcgcgggcccggcagccgccgcagactttcacgtaggcgcacgagccgcacttgcccttgtacgacgtcaggtcgcggatctcgttgaggaactctgatttgtcccagatcgccgcgaagtcgtagccgttctcgacgaggttgcccgctgagatatccaggaagccgcaggtctgcacgtcgccgcgatggctgatgaacccgaagccacgaccgcccatgcagccgctgatatgtacgcgcggctcctgcaggtttgcctcccgatagacgcgtgcatactgaggtccacacgtcactcgcagttcgatggccaggtcgttcttcaatgccagcaagtcactcagtagctcggcgtattgattcggcgccaggatttcttcccggatctcatcaccccgtcccgtggggaccaggatgaaggggttgaagcagtaagcgccgagttggcgggccagttcggcgatcgcaggcacctccgccagattggtgcgggtgatggtcgtattgatctgaaactgcaggcccgcttcgtgcgtggccttagcggctttgacgaccgtctcgaaagcgcccggcgtgcgccggaaggcgtcgtgagtcgcggcggtcgcgccgtcgagcgagtaggacatcgccaggacaccggcgtccttcagctcggccagcgaggccgcgtcgatcgcgtagccgcaggtcgccatcaccacgcgcaggccctggtctctgccatgccgggccagttcgagaatgtcgtcgcgctcggtcggctcgcccccggtcagaatgatgacgcacttctcgtaggccgcgaccgagtcgatgatcttcttccactgctcggtgctcaactcgtccctgtcggccgtgcggtcggcgttggcccggcaatgccggcagttgaacttgcaccgccgcgtcacctcgaacgccagcaatcgcggcttgtgattctgtagatgtttcttcataggccccagactctatcgaaatccactccaaccgtcaatgcgcaccccttcagcgtgcccagtggccttacgctggtccggcgaattgggtttgattggctctgtttttctcgcataatcagcgttttcagcccccaaaacccggtaattggctttgtttcgcacaattgagtccatcgccaccagccgctcggtacccgccggcccaattgggttcgtttggcttcgtttttccgcccgatctgcattattagcccaaaaaggcagggaattgggttcgttttgcataaaaagggtggctccggccagcccttggcacccgatagggcccgccgcctttgtctcgttgcggagggcagtgctcgcccgacccaggcctgccggccggattgatgagtgagtatttgatatccagttttcatgttcggtggttataatacaaacatcgatgcccggcgtcaagaagaatctcaccgatcctcactttttctgcactttcattttcccccgtgccgcccccgtatctccagctcagacatagatttgacaccctgcctacgtctctgtaggctgtatctgtaaacgtgcttggggaagctatgacaggagacgtcccggacacctgtggttccccgagacatccggttcagagggaggaacatgatgcgcatcatttcagtgttctttgtcctttcggggctttcggtggtcttggcgtaggagggcggcgcagaggatcagtcgcgagagaagttcaagccgccgaagaaccctgccgagtaccgtgcgatgctggagcgagcgatcgccaacatagacaaagagcgagagaacgcgccgacgactcttgccgaggcccatgcgaggctggagcagatgttgtctcccgggacactggctgagattgacgctatgccgtccgaagaaggcatgatcgagtattacatgggtctgggggcgcacatccgcagtggttgggggttggggagcgatttgcccccggcgaagcctcctgcgtaggcaggggcttcgccgggggctatgctatcacatcttaccgattacacgatggcctacttcaagacccttatgcactcttcctacgaagtttcacgcctgccacgctcaggcccagcatccccagcaaaacggcaccggggaccgggaccatctgtaaaccacggacggtcgagatgtagttgccagagagaccgccatccaagtaccacgctgaacctgaatatgaaaggccatacttcctcaaagaatcaggatacccaccagccgagttgttcttgtcatcgtcagagtcggttacgtagatggcagtgtagtaatctgcactgatagggtcatactcaaagccccaggctgtaatcgcgtgcgccatggttcctcggattgaaagaccaatcccgtaaccatcgtgcatccaatcgtcaatatttgaaagtgccgctgaatccgtgccgtccactctcgtgtaatcatcgtgattgagtgtcggatagaatccacctccgccatcaacatcctcctgggcccaaccattcgtagcatgaactgcaccttgcatatcattggttccatcaaaccaccagttccaaccaacgttggcattgccacctgcatctgtgaaatgtgctccgaaatgagcgaacatgtcgtcggtggtagtcattccacccacctggccccaacctgtgtactccaggatattggaggccgatgcagcccaacacaataagtcgtcatcttggtttacatcagtcttctcagcatcggcccaggtaccaccccaggtgtcccagatattatagatatctgcaaatgagctgctggcgagcagtgccacgatccccacagcaacaaatgaaactgcgaacctgtttttcatcaaaatcctccgtttccatgtctccatgtatttgacttaatggagaccttcaattcgttgatggcccgcacgcgggagagcatttcttggctattacaggaccggagggccgcgcgctgccagtacggctggtgcgaattgggatgtccggcaaagtgacgcagtgtcatccaggcgagatggtgcaagagaatcccccaccctggaatccggctgaacgaagcagcgtactggtacagagcagagaatttccggcgacacagcaagattggggccgatctggaaaggaccggcgttgtggtaccattccgggacagagcccagggatgatctccggacccagtggccagagcgacacagtcccaggccgagaagggcgtacagacaataatccagactgcctgatctctccgttaggtctgggccatgttgcgtggctcggcccgttccaccctctgcttccgtttcgggcaaaggaacgatggggcttgagttcagatctgaaagattgaaaggacaagcgaacaaactgtacgaatttgctcctcgaagctgcgcttgctcgcagactcgcgaaacccgtcctctgccagcatccaatgggcagacgggcatcaggtcggcaaagacaccctctgtagcgatcagagccgccgcaaccgcaatgatgaccctactcctgtccgtcatcgacccttgctccgcacccccgcttcttttgctaggccacctagactgcctatatgtcccagtgtaccgtgactcgtcgttcgattccaagaaaaacgcaccaaatcacggtctttccctgttttcgctttctgtatgtctgtaggctatgtcctaaatatgcttggggagctatgtgtggagaggtctcgacaatccggccaactgacccaacgccgcgatcggcggcgcgtgacaggtctctggccgcggtctgcgctggcgatgctgtccagagtgacgatatcggcgataacgaggagacctggaccgagatgaccgtcgagggcgtaggcaaggggactaatggcgggatcgatggtcgtgacatggcagttgaataggtagctgtccgaatggtggtccgtaaagggagttatagataggaactccccggatggacaagggcatgcatataagttgccgcatatgacccttgccgcgagagacaacaagaagtgcctttagaggtgatgttgtcaatcagagcacggagcctccaatcttcacgaaggaaggtggcatgcggctcggacggatcgccattcgttggcgtctctattatccgcctcaccagcgcgggtgggcccaccggcgatacgtgtggtagagggaacaccgagcaaggagatgatcgtgaattcgaggagcaaaggggtttccaggattgtgatcgtcgtcgtgattctgttggccgctgtcggtttgttgcccggtcttttcgttgttcgtactggcatggtagaacatagaagtgcccgccagagactcgtacgattgctcagtgagaccgattaccaaacggtcctggaagcgtgcagggagctgtcgatgcgtgtcgcccgaggacatctcaagcctggcggttatggtgtccggttgaatgtggccccggaggctccggatttccctcaagtgattttggccctagagccggcatgcgtcctgatagaaaatgatggtcgtgtcttcgtcgagatgcttggctatcccagctacggcgtagtcgcctaccctgagggctacagggtcggtccttatggcttgggggacgtggagcttatacccggattgtggtattatcatgaggactacgataagtatgtggattacaggaaggacgtcaactccttggtggaacgaggaagggcataccagtggcggaccctggttgattgcagcccattcacgttaaagtgcttacaggctctcggctgcgggctgcggtttggtcggctgatatgtggactctcaacgcgcgaggttcatggttgatgtgcgccggcagacctgctcgtttggaaggtgtcacgagacgggccccgaagcggcttgtggatgatggcggggcattgcataggggagtgatcctatgattcggtgggcggggcccaccctgcgcgactgagttcgtccccaggtgaggtgttaagagtctcgtaggagttgctgtcatgggcaaggtcacgaaatcacgtcgggaccgcatcattgtcgttgccgtggtggcagcggttgctgctattctcgctcccttcgcggtcaatttcttcgggattctgcgagtgtttcacggtgtacaagagagcagagtccgattgctggataaaaccgatcatgtcgccttgctggacgcctgtcaggaactctcacgacaggttgccgccggagagttggctccaggccggtacgagagacatggcgagcagtgggagccggcgttcgaaccgccagaggtcatccgtgagcttcgacctccgctcctcagaatcgacccggatgggcgtgtggtggtgagcatggccgcaggactaagccaattcggcgcgaccgcataccccgatgggtaccgagaaggctcagcgagcttccactatggtgaccgagaactcatcccgaacctatggtactttgacatggagtaccagagggagccggattacgacaagattgtcgacggaatccttcgccggcacggaggccaatcgggagcggattagcgttgcgagggaattgaaggcctgcggtctctcccgaagaggaaagaacacctgacatctttgaattcccagtggaactgcctgccctggacgagggcgaccccatcgtctggtgagccggcgcggcttgaggattggacaagacggtcgcaggcgcctattgaaaggggtagtattgctgccggatcgatggctggttccatcaatctcttgttgacacggacttggtctctctgctagcgttgcatcaatgaggtgtgttgttccgtatgtgaatacgccatggtgtcgaagatagacagcccgatgtcgctccaggaagccgaggggtgggctgttcattgagtcgcatagccagcagttactgtgaagatctggtccaataggagacaagatcatggcgacttcggccctgacaggcgcgcgggaaatcgtagattggctcaggcacaccgaggaacggatcgggcagttgtatgcggcggcggccaaagtttgttgccacgacgcggcgctgtccagtttcctcggtcagttggcggaggacgagaagtcgcacgccgagttcatgacgcgggtgtgggagcattttcgcagcaccaaggaggctccggtactccgcgttgttcttgacagtgacactcaaaggcagatcgaggaactcttcgagcgatttcagaggctgttaatcaaagcggaaatccccaagcaacgcatcatggagtacgtcgcccgggccgagtcctccgaactgaatcccgtgttcctctacgtggccgacgagtatcggcgggcgggtcgtgaaggcgaacacatgaccggcgagattcaagggcatctgctgcgcatccagaagttcattgagaacctgcccaaggaccagagaccttctattgatgtttgcaccctgccttctgtgggtgagccgcgcttcctggtggttgacgatcatggacctttgcgccggctgatggcgtctctgctttctcgccgtggaatggtcgatacggcccaagggggccaagaaggattggaacggctgaaagagcattttcacgatggtgttgtctccgatatccggatgtcgggaatggatggattcgagttctaccagcgtgccgtgcaatacgacggtagactggatcgacggttcctcttctgctcaagtgacgtgacctctgagaccgagggccacctccgcgagaggaacctgccgtttctgaagaagccttttgggttgcacgatttccatggggccatcgagaagattctgagcagcacggatgtcgttcccggaagaccgacggaatagaagcgtccggcgcatcacagatctggaagtcggccattttcctcgcgcaatcttatatcactgaaagccgcatctctatatgccctgttgttggcgccttcgttcagagaaaccctcaaggcgtatcggcacggcgtgggcgcggggacgcctcaaccaggccggacggcgtccggggggtggacagcagtgtgtgaaacagcttccagcgtttggcggggtcggtcgcgccgccgtggcgttcgatgtagtctttgacgagccgccgaccgacggtgtagttgatgatatagctgcgatgctgttcgatgaactgcatcaggcccatctcggcgcccggggctatcagggagtaacgccgcagccactgcttggtctgggcagcatccatcttgccgtcgagatagcgccgcgccgcctcgacaaccgccccgtccaattcgctcttgagttgcatgatcctgtcgtaggtttcggcctgggccggatcgatgtccagcaacgggaacagtaccgaccgttcgaattccaatcgctccttattgccgagcaggtcgtaactgccatattcggccagtccctctgcgacgagcgccaggggactgtaaagagggaggatcgaaaactcaatccaacgcctgcccttgaccaggtgcttatcgagcagggtcagatgcgtgtggtggcccggatacatctcatgtcgggcgatgcgaacgatatcggcgatgcagaacggcgcactggagttgacctggatcagactgacgccatcgccttgataggtcaccgaggcggcccagggcttgccaaaaacgaactccatctcgaaccgctcgtcggcaggcagcgtgacatgctcccgcgtgggttgccgataggcggcgatcgcgcctttcagcgccttctcgatctcgatgcgcggcatggtgaattcgatccggtactggttgaagcgccagtagagttcgccttcgccgggcaggagtctgtcgagttcgtccagaatgccctggtagtgtgtgggctcccaggccggcgcgacggcgtcgaacagggcccgagactcttcgtcgaaggacattctgacgttcgccagcaggtcgatcttgcctcggacgctgcgcaattgcttatcgatatagtcccgccggagtttttcaatgccttcgactccgtcactgtccatcccctccagttgcctgatgagcgcatcggctccgccccgcaaccgggcgccggggaattcgccctgcatcacgtcgtcggcaggttgccacgcagacgggccgaagtaggcgtcgacatagccgtcgtcatacagtcccacctccagcacaagcttaacatatccctctgcgacatcgttgacgtcagcctggccggctgtcgcgacagtcccatccgccagtagccagagcgccagcagaaaacagcggtgaatcctcattctctcgttcctctcatcctgcgcggtgttccagcatggcgccgatgccgaccaggggagggcggtgttggcgtgccaatgcccgctcgattcctcacgatgtcatttgccttggattctcttggtaaatcggaaggccggccggtgtggcctgaaaaaaagtgaaaagatacggaaaatcccttcccggagggtcccggtggacgtacaataaggagtgaatgatcactccggtcgaaagggctggtattgtggctaggagcaatagtctttcagagaagaagatcgccattctcgaggcgacactggtgttgattgccgaacaaggcttccacggggcgccaacttcggaaatcgccgagaaagccggtgtggggatgggatctctctatcggtactttgaagataaggatgaactgatccgagagctgttcgtgtacgttacggagcagtcgcgacgggccatcgttaaggggcatgaccctgaggcgcccttcagggaacagtatatacacctttgccgcaatgcgctgcggcatatggcgagccatcctgacatctttcgctttgttgaacagtacctgaattcgccctacggtgttggcgagcgacgtgagaagcttctgggcctgggcagcgtcagcgtgacggatgggccgctggaggaactgtttcggctggccagggcccgtcaagtgacgaaggacattccgctaccggctgtctatgccctgacgttcgggccgctgttcttcctgattcgcgacgtgcacgccgggctgattgaggtggatgatgagatggtggaacagaccgtggaggcctgctgggatgccgtaagacgctgaccagcggccggaatgtagggtttctatgggagaccctgtttttttgccgcctgtcggagggagggctcactccggaaggcggaaacgccgggccgcaaagaagccggcctaggggaatagagatatgctgcactacaaggatcgcgagcgtaaagtcgacattgttactatggaccgtgtgctggctaccgatgtctacgagaggttgcgcgcgtacaagccaatggaatcggttgaagtggttcgcccgggtcgcgggggcgacgagattacggtgcaggatgtcgaacagttcgttcctgataccacgcgggccgccgtcttgatcatcgacgttcgctatcagacacgagcgaagctcaggaacgcttatggcaccatggttcggcggagtcgtcccgatttccatacctattgccataccgtcgtcatcggtgggggaccgttcaatgtgtttcggccgggtatggccattgaggcgtttcgcaactacctgctcgagatgcgaatcgattacagcccggcggtgtgtttcgtcgacccgttccttcattatactttcgacgagatgcaggagcgggcgctgtacgaaaacaatacgctgccggatcggataccgaaaaatctgcagaagcacttcaaggcgaacaaactgggggccgagcaactgcgggcctatttccgcgccgcggacgtctctgagaccgggagggaggggcggagacgcaagaggcagaagatgctggaaggactgtatcgccggttagtgcataaggacttccccgaccacgaggaggagttggtgcagaccttggccaaggaggggtgtccactgctgggcgaaacgctcgcgttcaatatctatcccttctttttcgccgagtgggtgatggatttggtgcgtaaggttgatgcgaccaggtctggggggcaggccctgcgaagggactgtcgcgtgccgggcgccaagagcgcgtgaggatgttgatacgcaggttgccatacatatttgactgggaatcgtcatgagagtcctaatgcttttatatatcgtgtcctcctcgctgtgccttgagcccgcagttctgaggcgcgcggcgcagcgttgaccggcggtgacgggtactggtgccttcggtcaaggcagtgacgccccgggtgccgatcagtgaagtccttgtcagtactcccatgcttcagaagctgatcgtcgagcagtgtgacagcgatctgcctgtggtgattcgcggcggtcgatggtggcgcggatgccggccaggggcaaggcggcgctggccaggtagccgggcagttggcgtttggtgccgaagatccactcgcagacgtcgccgctttggaagtcacgcaccatgtcgatcacggtttggtcggccagggcgggatcgaccagatcgagcgtgtagacgaaccatccggtgggtgtggcccagtaggcgccgttctggtaggtgtcgcgaccacaggatggtttttcccagtagagaccgccgggcaggtgtcggatctggccggcctggacgatttgtgcgtagtgctgctggaaataggtggcgacggcttttgattgcttgctgtcggcgacgcccagatagactgcaaaggctgagccccagatgtcatgctctcggcactggacggtcgcggcgcggaagagcccggtatcgcggtcccagaaggttttgcgaatgctctgcacgacacgttggctctccgcctgccacttcctcgcgtcgtggtcgcggccgagcgttccaaacaggtccgccagttgtcgagacgcctgcacgtacagcagcgagcagaacaggacctggccctgcttgccgatcgtgtcggtgaagccatagggacatcgctcctggggttcgcctggtttgatacagacgagccccgtatcgggacggcggggaaccgcgttcattgtcttgaccagcggcgcgatgatctctgcgagcaaatcggcgtcctgggtctggcgataggtgtgccaggcgaccgagacggtgaactgtgagccatcggcgaccggatgcgtgcccatcgaaccgaaacccggcttatagatgggcgcgccgtcgaacttgacgcagtcggtgccggcgccgtcggcccgcatcttgcgtacgaagagtcggcacgcgtcggtcagttccttgtcggaatacgcatcgatggcgccttccagcgtatattcgtagtcgcgcagccagaaggcttcgtacccgagcccgacctggggcgggaaggccgcagtgccgtcggccattgtgcgcttcgaggctcggacgagacggtgcgcctcgctctccagccatgtcacggcttcggtgagcgtctcgggaccggtctcggtcgcccgaacggttcccatcgggacaagggcgacgacaagcaacactccaagaaaccatcttcgcatacgaatctctccttgggaactgttggactactcccagaccagacgggcgagactgacgccgcgcttgggccactggacgctggagatgtaccagtcgccatcttcgccctggaacacttcaggggcgtgggcgtccagacgggtgacgagtttgtcggtgtcgaacgaatagggatcgtcggattgatagacgtaggtgacatgctgataggcgccgttcagctcttttttgtcccagtggccgtcccagccgcagacgaagaggtagaacgtgtcattgtagcgaacgatcgagggcgactcggtgtctacgttgtccttcttcttgaggatgcagcgcgtctgcgtgcaggtcacaagatcgtcggattgcgccataagcacttcgtatcggccgcacaccatgatgtgccaggccccttgccagaagatgacactgggatcgcgtccggccggggcgttcgtcaccgggcccttgggagtccattggtgcaggtccttcgaggttgcatagcgcagcggggcgggcccgtagatcatgtgatagagcccgtccttccggatgatgtagggcgcgtggttcgcttcgatctcgcccggacgctcggcgggggggagcaccttgggcaggtccttccatgcgccctcacgcaggacgtccttcaagttacccttcggcgcctgggcatgaaacgacaggttttctcccgcgtggatctgatcgaacggggtacgcgggtgtgtaatgccgaacgcatgccagcgtccgttcgggcctttgacgaagcagtggtcgttgggcacccattcggggtagtactgccccgccttcaggcccgcgacgtcggggcccggaaagacatcgccggccggctggtagatgtggacgtagggcccatcaatcctcgggatacgtaccttggcgctggttgctccgcgctgcccaagggtggtccggtgatgggacgtggcctggacgatcttctcatgtgactcgtagggccggtacatcgctcgcatgacgaaacggtaacgctggcccacctcgtagttggggatgaaccactggaagtcccaggccggattgccttggcctccccccgagggagactggctcagacgcacctgatcgcgcgggcgaaagatctgtgccagggtcatatcatgactgatgccataataccagggctcggtgtagcggtagcgcgagcgattgaacacgagggtcagtgggaagtttgggtcgtgcttgaatgtgcgactgtcgtcaagagccaggtgtgtggcgcgcacgccatgggcgggtgtcacgccgcgtatccagcgacggctcgcggccggttcgtcggcgggtcgaccccaaaagtgaatgtccagggatttgggttggtggatgtagctggcgaagaacaggccgatgtagtcgttcgcaaaggttcgggcgtgggggacgcattcgagggtcatctcgatcgcaccgtcggggagcagttcgtaggtcagccagctttcgagtttccagtggggtgtaggcggttggtgcagcgccgcggtatggtcatcgacctgtctgatcgtcatcggagcgttgcgaggctcgaacagaatgttcctcggctggacggtcccatcgtggatgtgctcgaagttcaggccggcgtagaacgggacgaatagattgtcttttcgcttgcggtgggtcagcgaggcgacgccactgtatccgcggcgatggccggggagtgtttcgtcgtcgactgcctcgttgttgacgatcaccgccgttacatccccgcgctggagcacaacatacgtcttgtccgcagtcccggccgggagcgaactgcatgtcacaagcaacagcaatgcggcgaacgagaggggagcgtgcatcggaaagcgcatttcaaaccagtttctcattgggcgtcctccctattcctgggcctgacgagtacggggcgattatagcagagaaacttggagtaaggcaacgaatgcctggtggtttacgttcgagacggcggatgtaaggtttccttctccgtcgtctcccgagacgatcggctcgggagacgaacacgtgtgtattaaactgcgccttcggctctgctgggctcagtcgtcgattgcgttcggagtgggctcgactctcatgacgccgagataggtgaaatgataggagttgtcattgttggcggtgggggccaggctgatcgtgatctcaccggccgcgtccggctcgatccccgtggccgtcacgaagttgtcgacgttagcggcgacgtccagggccgcgaattctgcgttggcgccggtgagggtgtagcccgtttcgcggttgtcgcggatgcccatgcgtgaggcgtagaaggtgaagtcgtacgtcagcagcgggtccagccccgccagcttgaaactggggaagacatcgcttcggccgctgaaggtctccgtgttgccaaagagcgagtcgcgcgtggcgtcggtcgggaagagagcgaattccaacgtgccactctggttggcgccgttgaatcgactcagcatgaccaggtcgatttccgtcgttctgccatcgacggttgtcaggttgagcaactgacctgagtccgaagcgccgacgctctcggtgatattgttccatgtgttctccgtatcgctcgtcgtcggcgtactgcccgatccgaaatcgaagagaaggatttcgggctgcacctgtcccgaagctgtggcgcccgccgccagggcattgcccgccaggtcttgcacgccggtgacactgacgtcgaaggtggcggtcagacgctcgctcagcatcaggacaacggtttggccgtccgcatccagttcagcgctgatgacggcaaccgccccttcattgacggcgtagttgtcgatctgagtcacggtttcggggtcgagacgctcatcgaaagaaagctcgatcgtatatccgttggtgctggttgccgacagcaggaccggggcgttcacgtcgggcgccactgtcaggacggctgcgccgctggtggcgtcatagagcaggttgctgacgctgacggagaacgcggcgccgtccaggtcgggtgtcaccaggtcgatggtgtaggtaaacgcgttggcgtcggcgatagcctggccatcctggaaccactggacgacatacgggggcgtgctgtcgaccttcgcttggaacgctgccgagcgatactccagaaccctctggtcggccggttcctcgatgaacacgataggcgcctgctcggggatctcgtccatttgcatcgcgccgaggtagatgaaatggtatccgttgttgttattggccgtcggttcgaggctgatggtgatttcgccctgttcgtcgggcgtgaccccattggcgatggcgacgtcatcgacgttgttggctgggtcgagaacgacgtaaaccgaatcagcgccggagatagtgtagcctgtttcgcgcacgtcgttggccccgagacgggaggcgaagaacgtgaagttgtaggtcaatgtcgggtccaggccggtcagcttgaagctgggcgccacgtcgctgaaaccgttccagtttggtgtattgccataaagcgaatcgctggtggcgttggatgcgaattgggtcgattcggtggttccactctgattggggccactcccgttgaacgggctgagcatctgaaggccgatctctgtggacgtgttctccgtgtcgaccaggccgagcaactgaccggtctctgcgccgccaatatccaggatgacgttgttccagaagtgggcaggatcgtccggggtcgggccgttctgggtgatggtgttgacggcgccgaaatcgaaaaggaagctccgcgctcccggcgacgcccaggcggccagtacgggagcgaagaccgattgccacagttcgtagccggcggcattcatatgccgcatgtcactgccgaacagttcggggcgcggctgaccgctgtcgttcagcatgggcgtcaatacatcgatgaaccagaggtgtggatcgttggcggccagttgctccagacgttcgttgagttgcctggtgacttccaggtactggctccggctggggctgggtttcgtcgcgatgaagcccacatcggcgccgggcaagtgctcctcgaccagtgccaggaattcgagagtgtcgtcgtagactacgtccaccgacttgccgccggccaggtcgttgtcgccttcgtagacgaggatcagggccggatcgtaaggcgcgacgatgcgatcgaagtagtagagcaggtcgctcatgtgcgagccgccaaagccacgattcatagcgggatagtcggcgaagtcgcccggcaggtcgggccagacgcggatgctggaggagcccacgaacagaacggggtcggccggcggggggctggccagatccgcctgctcgaacgcgcggatgtcgttctcaaaacgcgtcgggtcctgggcctgggcatcgagaaggggcatcagagcaaaggctaacgcaagccagctgaggaagaaggggcgaaggccaggtgtcttaagcgattgagtgacggtgaagtccgtgctctcgttcataccctgcatctcctctttctaccccgagccctgttggggctccgactcttccccctcgaccctcctcgtgccatccgcggagaaggctaacgatgtatgcctcatcataccacaatcgccaggcaaccctcaacacctctgtccctcaattcgccgactactgctattccgacgggaactcagacgtcacggtgtcatgaccttgagtttcttgatcgggccgaagagggcggggccgtcttttttgggggtttttacggagattgtgaattggccggcctggttcttgcgcaccgataggttcctggtgcgatactggcccttctcgtagttgaaggtcttgccatcgtcttcgtagagggcgaaacggccctcggtcttgccatagaaacgcacttccagggggtgaccataggcctcttcggtctggttaaccgcttcggtgagcatcgggaccacggcgccttccttggcgaacagcggcatacggtcgcccaggtccttggcggtgacggtgatcgtcttgttgttgccgacgaacttgcctgtgtagaagtcgtaccagttgccggccggcagttggacttggcgcttgatcgcctggcgttcgtagaacggcgcgaccataatggagggaccgaacatgaactggtcggtcttttcgatgatcttgcccatcgcgtaggggttggtctcgctgtcgagcttgccctcgatgacattgccggccagttcgccaaacccgtcttccagaatcatggcgcggatgggcgggatgcccttgaagtgatagtcggcgaacgcgctgtagaggtagggcaagaagcgcatgcgcagcttgatcacgtcacgcaccgaatcggtgacatcgccatagctccagggcttcttgccggacgaccatgcgttgagctgggccatgggcgagaagcagacggtctgcatgcggttgagccattcgcgaccgttaccggccgagcgggcttcgggggtccacaggaggccacccaggctggcggtggacaggcccgtgatgtattcggcatggccataggaatcgctgtagatgacgaacgggtagcccgaggcggcgccgttgctggcgcggaccagaccataggtgcggacgttacgcttcctgaacagatcgttgtagagcatgttctgcatgagcaggccgtaggattggcgcatcgcttcgcccgagatgcccgatgggaacgtcgcgtggtccggccagagccagaaatcgtagccgtccacctcatcgattttgtacccactgatgccaatgcgaatgtggtcctcgtgatgctgatcggtgagcaacttgcgggccttgggtagggtgtagtccgggacgatgcccagccagaccatgtgcgagccggagagcggatacatctcgtcgtagatgcggctgtgcttggagatgtaagggttctcccagaggttcaggcgaatgccttggcccagcaattcctgggtgaacgcctcggggtcggggaagcgtttcttctgccactcgaacgtgcagggataggacttggtcatccagcccggctccagaccgatgacgtcgagcgggaagtctttttcgacgaactgcttcaactcgtcacgcgtctggtcggcgttgaaacgggcgtggacccggtgccagaatcccaatccccagagtgggggcagggcgccgccgccattgtagagattgtagcgactgacgacgtcgagcatcgagtcgcccgcgaagacgaccacctcgagccctgcgccgttgatttgcgcttcgacggcgtcacccggtggcatggccagccagggccccggctgcttctcgtccttgggcggattgcggtccacctcgggtgggttgtggcccgagtccttacggttgcccacctggttgtagatcttcaggaatcgagcggtattgaagaagacgccgtagcccttgctcgagatgtagaacggcacgggggcgtgggtgcgcccgccgcctttgttccagtggtccacgttcagggtcaggatcttgcgggacttcttgatcccgtcaaattgcaggccgaagccatagagcttctcgtcggcgtcggtggggatgcggatcatgaccttgccatccggcgtgacgagataggtggtttcgcccggcgcgaacgggaactcgggtttggatagctggttcagcctttcgagtctcgggccggctgcggccaggtccgtgtagcgcaactcaccgtccatctggcccagttcggccttccagatccccggtgcgacgttctgccagggcttgacaggcgtcagatcgctcagacccgccgcatggcatggagcaaagagaaccatcagtacgatcgcgatgagaacggcgcggagcattaaacgagtcctgaccatcggtattcctttcttcgatcggggtcttctcaggcccacattcgcggcgccttggcatacagcgttccccaccataccacactatgcggctgatttccacggcttccaagggttgctttgtcggttgccgggcggctagaacgcgtgcgagagggacaggccgatgttgtagattctctggtggtaatcgatgtcgttcacctcgcggtcgccccaggcgtggcccagcaccaggtccaagaaccagtcgttgcaccattcgtagccgacgcccagcgtgaggttgtggcggtcgacgcccacgatgttcgagaggctgacggacttgtcgggcaggggggattcgtcgaagaaatagccggcgcgaaaggcccagcgcagggcgggcttccattcgagacccaggcggtagcgatcggagtcgcgccagtcggaggagtagtcctgattggccagcgccacgccgggcgtgtcgtactcgatgtcgatatcgaaggtggaccagtcggtacgctgccagtcggcggtgaacgtcaggttggtcgtgtgccgataggcggttcctaggccgtaggtggcggggtggcggaacttctgtacgaagccgctggattcggatagaccgagcagcgtcaggctggcgcgggcgtgtccatctagatcgatgacgccaccggtgcgatagacgccgcccaggctcagcttcttgttgatgtgatagagtccgccgaagatgccctcgaagcccgttccgtcggagcctgtgtcgagggcgtagctgtagtcgctgatgcccgaatcggcgacggtcttgttggcttcgtattcgacgtcgccatagaggacgtccaggccggcgcccagggccagggcgtcgttgatctgccgggccagggagaaattgatggcgatcacgctgagttgctggaagagttcggcggtgatggtgccgccgccataggggacgcggtcgtcccagtcgacgtagtagccggcggggatgtagtagccggcggccatgttgaagccggcgtaggaccagtagcctccggcgccggctgggatgtagaagtcgtagttgaccttctccttgctgaagcgcgtgggctccatctccggcgcatactggacgaagatgtcacgctgaaagcgcgggtccattccggccaccggcggattggcgatactattctcatcgcgcatctcgatatggggactgctgaagtcgaagcccgcgccggcgccgcgcagttgggtcaggcccgccgggttccagtagatcgccgtccagtcgtcggccaggccgatgaaggcgccgcccatcgattgggcgcgactgccgaggccgccccattcgtagccgcccgctccggcagggtgggtcagagcaaccgtgagcgtgaggatggcgacggtcagaaggcgcctcttgcgttggtgggcgaaggtcatcaaagcggttcctttccattgtctttggggatcgatgtgtcttgttccggcgcgtccagcacggcccccggttcccagagtttaaggattgccacgcaggctggcaagacaaagacgtcgcccatccaggcagcgatcatggcgaccgcggtgaacaggccgaagtactggatcggcttgaagtccgccagcaggaggacgacgaagccggcggcggtgacgatcgaggtatacgtgatggccgggccggccttctggaggctgttccgcacggccgtaacggtcgccaggctgtgccgcttctcatcctgatagtgagccaggaaatgcaccgtgtcgtcggcggcgatgccgatcgcgatgctggcgatcatcaccgtggcggtatcgaacggaatgcccagcagcgtcatcaccgcgaagacggagaagatgggcaacaggttgggcaggatcgcggcgacgagagctcgccaggagcggaaaaagacgccgatgatgacgaggatcagaccgccggccagcgcaaaactgcggatctgcgtttcgatcagcgactgctgggcggctttgctcagcggcgcgatgccggtgacatagtgcgtcgccggcgctgggatcagggcgctggcttcctcttcaatgaagtccagcagtcggtagtactcgctgttggcagtgcgccggatgaagacggacagccgtagcgagatctgctcgtcggcgcggtgaacgtaggcatgcagcatgggcttgagcggattctttcgcgccgccagcgaaggcaggaagacggggatcgggacattcttgaagcacgaggcgatagtgcggtagtgcatgaccttggccacctccggtcgcgtggcgattcggttgcccaactcctccagtgtcttgagcatcgtgctgccttgctcggcggcggtcgtgacgcttatctcggccgtgtacatcccggtcaggtgcgcgccgatgaattcatagtcgcgccgcagtgtcgaatcgatggggaagaactgcaccacgttggattcgacgcgggcccgagcggtcaatccgaccgataccaggaagaccagcagtgccagcgccaatccggggcctcggtgtcggcatacgaattcgccgaccgccgccgtccagtggggtcgggccagttggggaagacctgggccgcggtgcagcaggcagagcatccccggcacgatggtcatgttgaatacgaacgacaggaggatgccgatcccggtgaagatcccgaactcgacgacgggttgcatctcggaaatcgccaaggcggcgaaccctaacgcggtcgtcacgttggagaggaatacgggccgcatcacttcggtcagcgccctccgcgccgtctccgtcggacccgtttcgtcggagaggtgggccaggaagcgggaggtgacgtgaatccctccggacagtgacagcatgaatagcagcgatggcatgaccaccgtgatcatattcagcgtcctgccggaggcgaccagaatccccatggcccagagggtcgtgacgcctaccgcgctgagaacggcgatgacgggcgagatgcccctcagcgtcacggccaggatgagcacggagagcaggatcgctacgggcagaaagcgttgtgatgtccgcgtcgagccgcgatccagggccacgttcagcaggggggcgccggccatgtggatcggcggaccgccaccggtcgccaccgccgcctcgatcccctcgatcacggctgtgcgggaggcggcaccgtcgacttccttgaggtagacgatcatgccgaaggtgcgtccgtcggcgccgatcaggaagttgcggaacaacgtgttctgacggatcagatccgcccagtcggagcggaagtcggccagaatctcggccgcggtggcgagggtgaatacgttgtcgacgttatcgatctgtcgcaaccgctcggccaggtccttctgaaaggccaggcaatcctcagacaggggatcgtcggcctccccggccaggacgacgaattcctcgttgccatatttgttcaggaagtcacgatagtcctgtcgcgcctggttccgctcgcccagccagacttcggtggcgttatcgattcgcgcgtcacgcagcagatagagggggacaaccgcgctgagcaggcagaccaaggccagccagcggcagtgggccgctacgaacccggacagcttgtcgtcggttttgtacattgtgggcagcaccgtatccagttatctgcagcacgagaccttagcaaagatcctccccagtgcaagcgcaaactgtcgcgaccgcgcggcgccatcggcaagaagcgcaagacggtaaaatgctgaatcatggacgccggctcagtgtgcatcgctcagaactggggatgcgtgctttcgtaaacgccgggtgagccgccgagggtggtgctggggcgccaggccgtttgattgcccagggcgttgggatcgagcgggggaggatcgatgaggaccagggagaatccctcgccatcagtggagcggcgccacttatcgtcgtagcggaaatcgacgatggtccggccgatggcgtcttcgagccgaagccgttcgcccccattgtcgagcttgccggcgtattggcctgcgatgttgatcgcgtcgccatagaacgaatgaaaggcgttcgggtcttgtacgacgatgaccgcttcgccaggcgcaagctccgtcgggccgaatacgaagtcgatcccggttgtgaaacgcacgaggttcagatcgatggttacgtctcccaggttcgctacttcgatgaactcggcatcgggctcgactcccgtcgcgacatcgtcggcagggtgatacatgatctccgtgatgcgcaggttctctacgacgggcccgacggcgaacgtcgcctcgttcagggcgctccaggttgcggcgctgagcgtgcgggccttgacctgggcggtgcggtccagcacgatcgggccggcgtaggcctgcgccgttgtcgcgacgtcggccggggcgccgccgatggcggcggtcagttcggcgccgatcaggaaatcggaactgccggccgagacgttcagcgcgtggatggcgagcagattgaggtccgagcgcagtaggggcaaaaaggccgagacgtcgatatattccaggccgacggcgtcggcgtcggagtggcccgcctcggcgctggaattccaggcgggctcgccttcgaaattccgccgggcgatttccgtaccgttgagataggcgacgaagccgtcgtcgtagcggacgcccagggtcatcgcgtcccagtcgtccgcgagtgtctccggcgtgaaggatatgcggacatagcacgaggtgtggctgccgtacatgagatcgtgcacgtcggcgctgatataaccttcatagcccgtggtgttttcgtagccgatcccgccgggcgtcccctcgacggcggtccagtccgccaggtcgtggcgcaatacctgccgccatgggtctccgatgtcctccgtcgggaccagcatatgcttgagcgcctcttcgccgacgagcgtgaactcggcggcctcgctctgcggcggcgcgggccggcgcgggtcggcgccatcggtggtgaaccaggtcacgccggtcggggtggtcatctccagggcgaatcccgtcgggaccgcgccgccgtgccggctgaatgccggggccgcgacgctgggatagaggccccgcccgcgcagttggttcagcacaatgtcgctgcgtcgggggaaatactcctgggtcaggaaatcaagttccgcctgccactcgatatccggcgtataggggtcgtcgggttgatgggcgtcgccccagcgggcggactcggccaccaaggccaggcgaatctcttcggcgcggtcgagccagcgggccaccgcgttttggggggtgagcaacccgccattgaagaagtggcggtgcacgcggtcggcgaactgcatccggtagtcggcgttggcggtcagtcgctggtggacgtgtgtgggctggttgttgttgtccttgccggtgacattgtcgttgaggttcaggaacgtccgctccgaatcccaggagaggaagtggaacccgtcgccgccggtgcgccggcgtccgccataccagttgttgtggtcccagtccacgttgcccgcgtagaagtggacgagcaggtagtcgatcaggttggggatgtccaggtactcctgaatctcgtggtaggcgtcggccgaggccaggccgcgatcggcgatcgccatcatggcgttccaggcgttgcggttgccgtcgacggtgccgcctttatgctgcacgacgtcgtactcttcttcgacaccgccgaggtgctcggcgaagaaggcggcgttcggccgctcgatcgcgtggtagaggccccagtacagaccgttgagatagaggtggacatagcattggcccgcactgagccggcccatcgcgcgctgcgtgtcacggggccattggtcgcgaatgtattgggcccgaatctgctggttggtgttggggtggaaccaggagtcgccgttgccgccgcgcaggacgatcgtatcgaaccgctgaatgggccagtcctcgaagagcgggaactccagtttggttgggccgtattggcccttgaacagcaggcggaggttgtgcttaggtcggttcgggttgcggctggccccgccctggatgcgcagggccgcattgacctgaatctccgcgccgccggccgggtcgatgatctccattgagaccggccgctcccagtcttcgccttcgctctgcgaattgacgtagatgccggtctccgggtcgaacaggtcgtcgacgtccagcgtcagcgagatcgttcggtgggtcagcagggcgacgccgacggtgtcccgatatggcggatacctgacgatggtcgggtccatttcgtaatccgctgcgccaccgcgccaggtgggcggaaagccttccgggttggggcgctgctgggtcacctggtcggcgaagatataggtgtgcgtccgcgtggtcgagggcttccagtccgagcggatcgccttggccttcagacaggtggtttcgtcgatctcgatcggtttggtatagcgtgtgccgcgataggcgcggcccgtccatacgtaaggttcacttccatcggtggtgtagtagatcgttgtctcgggcgtcgccgtcgtgagcgtcacgagcacgggcgcctcatagaagccccgctcgggactgaactgtacatcgtcgacgaatccctcgtagatcttgacgttggcgccgcccggcgtgggttgggacatgctgtgccaggcgtcggcgccgtcggggtagcggccgaacgagatgtccgaggcctgctcgccaaacgtcactgtgtcgatcggtgtcgcgccgtcgatgtcgagaaggacgatgtcctcgccccgagcgctgagactgaagggggcgtgcagacctggttcgtcttcggtatccccatcggcccagatgagcagaaagccctgggccggaaccgtcgtttcagcggaccggtcggcggggatgcgccacttgcctggttcgtccgggtcgtcgcttagatacatgcccgccatgtcgattggtattcgacttgtgttgtagatttcgatccagtcgtcgtattcggattgggggtcggctatcgtgctgctgttggccgccatgcactcgttgatccgcaaagggctatcgatggcgtgaaccgccgacgccaggcatgccatggcaagacacgctctaaggagccaccaccaacctctcaaacgactgggcattgcatgtttccatgtctaaccgcgttttggaccgataccgccggatgccgaccccgtcgggattgccacgtccccaattgtagcaaaagagaccctcccggggcaaacattgcttcatacgatcggcatgtgtgctatggcgccgcctgcggatcgggctcctccaactcccaccagagccgggggtagtcggcccctcatcgatccaccggatctcttcgcttccgtcatcttctgatctcctcgtcccaatgccgtccaccggcagattaccggccctcgtcgtgtctctcgagcgaaggtgctgacagggaaatactcgttccgcgtaggtttcagtataccggatcgggactgttcaggtcaaccttggtttgtgcgggttgtgggagggctttgcggggggatgctcgtcatccgcggaagtgcttggcgatgtagcggcgcacggggcattggcagatagttgttcgtccgaacgccatgccatggcgacagctccacccatcctcatcctggcagaacagcacctgttcaccggcggcccatttgacttctctgagcttctccagggccgattggagacactcgtgtcccctgtcgcagggcgtattgcggacgagttcctccagcttttcgcggtcctctcgggtcaaatccaccgtgaagttctccagtcgtcgtgccattgtatctggtgatattgtgtcagttgtaccggtccggctccgtgcgtgttcgtggattctcagaattccgcaaggtctcgacagcgcgggcgggactggtgacagaggccatggacgcggcttcgataacacctataatggcatgggtctctccttcgtgctgagagggatctgctagacgatggctttttcggagatacgcgctcatgcggcatacatcactgccgaccgacacggttcgattgggaagaatgtccagatggatactggtcttagtctggctggggcttgcggcagtggttcgaccgggttggtcgagcccggcccaatggcctcggacgcgggccgagcggaccggataccgggagacatcctcccatgccgacgtggtggcgtttctggagcagcttcgtgcggccggcgcgccgatctccgtgagcacgatgggcgccagcgatggggggcgatcgattcccctggtcgtggccacgcgacctctgacgactgacccggtgcaggcggcgcgggactgcaagcccgtggtgtacgtgcagggcaatatccatgccggcgaggtcgaaggcaaagaagccatgctgatgttgctgcgcgatctggcgcaggagccggccgggcggggactgctggacaagctcgtcttgctgacggcgccgatctacaatatcgatggaaacgaggacctcaagccccaggcggagcaccgctcgcaacagtttgggccggagagggtcggccggcgttctaacggcgcagggctcgatctcaatcgcgactatatcaaactcatggcccccgagacaaggggcgccatggagcatgtgttcatcaagtgggacccggacgtatttctcgatctgcacgccacgaacggaacgctgcatgggtatcagttgacctacgcgccgcctctgaatcccaatacggagccctcgattctggaatacacacgcgatcgactcttgcccggaattcgtggacgcctcaggcagcggtgggggatggagacctttgactatggcaatatcttcgtctacggccggcccaagccctcgaccgatcgtatcgcctggtacgcccatagtccggagtttcgtttcagcaccagctacgtcggtctgcgcaatcgcatcggcattctgtcggaggcgatgagtcacctgagctttcgcgaccgcgtagaggcgacgtaccgattcgtgcgggcgattctggagcaggtggcgcaggaggcttcgacggtcctggcgttaactgcccaggcggatcgtacggtcgtcggctgggggcgcgaccctgcccgtgcgccggcgctgggcgtgcgctttgccgcggcctcgcggggtcgggaggcggtcctgctggaggattatggcgatccgaaccggctgggccggcgtgacccggctcgaggccccggcccgcccgagaaggtctctgaaatcatgatgcctgtctacgaccgctttgtgacgaccgagacgtcacgatatccggccggttacgtcctggcgtccgacctgacggaggtggtatccctgttgcagcgtcacggcgtcgcagtcgagcgcatcgaaggtgactgggaaaccgaggcggagaccttcatggttgaaaccgtcaagacccggccccggtcttaccaagggcgccaattgtgcgaagtgcagggccacttccagagcgagcgccttgccgtacgggtgggcagcttctgggtttcgaccgcccagcctctggggatactgattttcagcctgttggagccggagagcatcgatggtgtcgcggtctggggattcctggccgatcatttgcaggaaggccgtcgctaccccatttggaagtgctaccagacgccgacgggccgcacccgatccttggattccgccgtagagtccgctggttgccctgagaggtgagtttttttcagaccatgattgcctttctggccccaattaggttatcatggccttgtggtgttctggggacacaagccggaactcctcgtgtgtggcgtctgagagcgtgtgtttgagaccaatgccaattggccaagcgagtggaaggggccctgaccatgaggaacagaagtgcattcacgctgatcgaactgctcgtcgttatcgccgtcatcgccgtcttgatggccatcctgatgccctccctgaagatcgcccgcgaacaggcgagggctatcaattgcatggccaaccagcggtcgctggcgcaggcgtacatcatgtacgccggcgacaatgatggtgcgatctgtggaggcatggctcgcccgagcgccacgaatagagtgccgccctgggtgaagccaccggggaacatcaacactgatggcagctttgccgccgtcgatggtgacgtgacattccagcagcggctcaacggcctgaaggccggggccatctatcctttcgtcaacgagcccgacgtgtatcattgcccgggtgacatgcgcaagaacatgggtacgagcctgggtgacgcacgggagtttctgatcttccgcagctattcgttgccggactacatgaccgggacaagcgccgccgatgcgaagaatctgtttagcttcaaggagcaggccaccaagatgctgttcgtcgaggagatctacgacggcgcctcgggcaatcacaatgtcgatggttggtcgtacaggccttacgacggtagcctgtgggatccgctgggcaacttccacagcgacgcctgtacgttcagcttcatggacggtcacgccgagcgcaagaaatggcaggacaagcgaactgtcatctactttggcagtcgcaccgacgcggccgcccagggctttggcaaggggagccagttcagcccgcccaacgtcgatctcgattggctcgacaagcactatccgggcaagaccctcaggaagggcgtcaactaacggtgccgccagacggcatcgtcatcgtcagggtccggatcgtaccgtcaggcgcatagtccgccgagttcagttcccttaggtggaccaatactcgcgcgggacgagaagcctattagcctcgccatttgccgattccattccagaattgttcgaccagccgggcattgccacgaagaacactgacgagatcgcatacagcacgcatacgatcctctcctcctgaacgatgaagatattgcccaatgtccctcatggctgcgttggccgtaggacaagagaaatcgtctctgcccgagagttccgaagaagcttcctcaccgagagcggctaaccgaaggccgagatagagattgattctctcaagatcaacctccaccaggtgtggtttcaagacatgaagtgcgtctgcgattttcgatttgtcgatatcttgataagacgaatgcatctgtttcgcaagcgcatcgacatcggcgtcttcccaagtccagttatggaggattaaccacgcgtgcgggtgccatgacagtatccacaggtcgacgtttgtaagaccagacagcgatccatagcgtctgagtatttctgtttcaatcaccacttgcgtggcattttttgactgaacagcggtttcgataaggtcaactgtcccctggatcgtttcttgcattctcttgcctctccatcggactctggctactctgagtgctcgtgaccctgttctctttaggaagctatgtaaggtgggtgctggagaccacttcaatcatccggacgccggcccggttatgaatggaatcgggtctgttcgtcggtttctcgaggcttctcaggacccgtcaccagggtactggcaggccgtgacatggtcaagggcgtgtcttgtcggagttggacgcggatcggaggcgggttctggggtcaggtccttctcgacgccacaacggtgcgcggggcagcctcatggagggtatttttcgcttgacattcggcgaaagtgtttgtattttagtaaacaaaaccaataagacatcaagctatgatacacaagcgtaaatactaactcccagtccgaaaggggagtcgtgattagtgaaacgcatgtctatgtcgagtgggcaaatcgggggacatccatgggcccggagccggcggttgcggcaccatcaattatgcaaaacaaacccaattgtgccctttaaagccagaaaacgagggtgaggcgaaaaaacaaagccaaacaaagccaatttgtgagacgcaatcgggggatgtgttcgcctttttgcggtagctcggtgggtcgacggccctgcaaaacgacgcggggagatgtcgcgccgggatgggatgaaaccgccgccgggaccggccttgacagaacggcctgtctccagggacaattggcactctttgtggcttcggttttcgtgattttccgatggcctggggcgtctatacttgtcgctgagtgaaatgttgcctatggacgagaagaagaatcagttcagtacgtttgccggtgtgttcacaccgtcgatcctgacgatcctcggcgtgatcatgttcctgcgcgccggttatgtgatcggccaggcgggcatcttcaacacgatcctgatcctgctggccgcccaggcgatcagtctgttgacggcgctgtccatgagcgctgtggcgaccaatactccggtggctggcgggggggcctactttctgatctcccggtcgctgggcccccagtttggcggggccatcggtctggcgctgttcctggcgcaggcgttgtccgtccccttctacattctgggcttcacgaacgccctggtgacagacgtccccagcctgggaccctggtttgggctcatcgcgctgggtacggcggtcgtgctctttgtcatcaactggatcagttcgggggcggccattcgctttcagtatgtggtcatgacgctcctggggttggccattttcgtctttctcggaggcgccctgaagcgtttcgatttcgcaacgtttcagacgaatctgggcccgcgttacacggggccggggatcggcttctgggtggtcttcgccatctacttccccgccgtcaccggcattctggccggggtgaatatgtcgggggatctcaaagatccggctcgctcgctggtccgcgggaccctggcggcgatcgtcgtggggttcttcatctatctgctggaagtcatcctttgcggcggctccaccgcacgcggcgatctggtcgagcgttcctattccatgctcaagatccacgccctctttggcgccggggtcctcgtcagcgggggagtgttcgccgccacgatctccagcgcggtcgggtcgttccttggggccccccgcgtgctgcaggccctggcgcgggacgggatatttcgcattctccacccgtttgcgcacggttcgaagggcacggacgagccgcgggccggtctggcgctgactctgggcttggcgctggtggttatcgtgctggtcagcggtcaggaatctatggccgctttcgacatgatcgctgcgattgtcagtatgttcttcctctgcacgtatggtatgatcaatctggccgccttcgtggagtcgttcggcgccaatccatcattccgaccgcgcttccgcttcttccattggacaacgtctctgctgggcttcgtcgcttgcctggttgccatggtgctgattgatgcgttggcggcctcaatcgcggtgctgaccgtcgccggcgtctatgtctttctgagccgtcgggttttccgggtggcgtttggagacgcccgtcggggctttcagtacgctctggtcgtgcgggctctgcagaaactccgtgacatgacgccgcatcccaagaactggcgtcccacgttcctggtcatggccgggaacacgaagacgcatctgactctgctgcgatacgccgtctggatggaagggggtcgcggcctcgtcaccgccggccaggtcatctcgggtgatctcgatacctttgcggcccgggtcgagagtctgcggtctgctatggacaagttcctcaagagcaatgagttggcggtgtttcccgaggtggtctttgccgaagacgtcgacgaggggattcgtatgttggcgcaagcacactcgatcggcccgctcaaacccaacaccgttgtgttcggctggccgcgcagcgccgaacgcgtcgaggcgatattccggcacgtctcgactatcgccgccctgggcaagagcgtggtggtggtggtggacaagggattgcccccgtccgtgcgtcgcgcgcggtgcgtcgatatctggtggagaggggagcaaaacggatcgcttatggcgacgctcgctcacctgctggtccagaactgggagtggggtcgtagccaggttcgggtcctgcgggtcatcggcgacgaggccggacgcgagtcgtcgaggaaagcggttcactcgcttgttgaggccgcccgcattcgcgccgaggcctgtatcattgtctcgacggaacccttcctcgaagtgtttcgccgtcactcggccaaggccgatgtggtgttcctggggctgcaaccaacgggcgatgaatcctctctggaggtgtaccaccgtctcaacgatctcctcgagtccatgcccaccacggtcctggttcgttccagtggtgaagcggatgtgttcgcttgagccggcgcagaccgatgctggcatccttcagggttcacgaaatacgggttaggagcagaggcgactgagttcgtccatggtcagactgctgagacgctcagtgacgagatgcgctgctgttaactgctcggcgtcgtaggtattcgtcacggccaccgtatgcatctgggcttcgtgggcggcttggagtccccagtgcgagtcctcgatgacgacgcatcgccccggggtgatgggagcggccgtcgattcgttgagtctctgcaacgccaggagaaaaccctcggggtcgggcttgccccgcgtgacgtcctcggccgagacgatgacatcgaacaggctacgcagtccggcgtcctggagcacccactcgatctcggtacgcagagaacccgagcagatcgcgatgggaacgctgccggttctcaacacgtcgaggaactcacggacgccttcaatgatctgcccatcggtccgcgcgagcttctcgaagacgcgggtcttcttggcgatgaggtcctcgatctggctcggttcagcgcccagtcgaccttcgtcgacaagcgccttgaagcagtccacatcgctcaggcccaggtactcggtgtagtattccttcttggtcaattcgagcccatggtgggctaacacgacgttgaaggcgcgaaagtgcagaacttcagagtcggtgatgaccccgtcgaagtcgaatatcacggctcccagcatgacggcaatgctctccctagacttcctggaccggcccgatcagagcgtcgtagtcgctgaaagtcgatttgtcgccctggcggaccaactcggtcagcgccttgatcttgggggcgttcttctcgatgtaacgccgggcgatcatggccttgcgctgtttcatcgggattgtctcgccattgccggtcgaggtgccggaggccgctgctacgtccatctcgaccttactgctggcttgaccgcagaacaaatacccgatgatcaggtcgatcgcgacatccgtcagggcccgaccgtagagatccatgtagtcgttgccccgctccttggtgaattcgatcgcggccctaagttgctcagtgccttcggccagcttgtccagcaggtccttgacctcggcatcgtattccagggcgaccaggtcggccagatacttctcggcggtcccgctgcagacgccccggacggccgcgacgacctgcaactggctggttccctcgtagatggtggtgatgcgggcgtcgcgggcgtgcctttcgctggcgtaatcacgcatgtacccgctgccgccgagcacctggatcgaatcgtaggcgacctggttgcacatctccgagcagaagtacttgctcatgggggtcagcagcccggcgtagcgcttataggcgcgggcccgattcttcagtgccttgagttcggctttgtcctggggcggattgttctccacctgtctgttgtatccgaccgccaggtccacgatccgggacgtatcatagagcagagcgcgtccagcctcgatggcgatcttggtgtcaatcaacatatcgcgcacggccggcagtctctcgatcgccacgccgaactgcgcgcggctggcggcgtaatcccgcgcgatccgataggccgcttcggcgatccccatcgactgggcggcaatcccgatgcgggccccgttcatcagcgtcgcgacataaggcgccaaaccgcgtttgcgctcgccgatgagtttgcagggcgtgttgtcgaagaagatctcgcacgtgggtgagccgtgaatgccgagcttgtcttcgaggcggcgaatatggacggtcgggcccggcccgcagacgaacaggctcagtcccagtccgccgctgcggtccgcttcgctgcgggacagcaccagcaggacgtcgccgcacccgttggtgatgaaacgcttgacgccatgcaggaaccagttgccctcatcgtcctggaaggccctcagcttcacggcctgcagatccgagccggcgtccggttcggtcaagaccatcgcgccggtgaccgtccctgcggcgaagggcggcaaatattcctgcttgatctcttccgaggcaaaggcatcgatcgtctcgccgatcccctgcaagccgaacacgttcatcagcgaagcgtcggcccgtgagatcatctcgttggccatcgaatagaccaggttggggaaattcaggccgccgaagcggtagggcagcgtgaagcccatcacctcggcttgggcgagtttctccaaggcctcggtgatgcccttggcccgcgtcacggagccgtcctcgttgagcgtgttgccttcccgatctacgtcctcggcctggggggcgatgacgtcggcgctcagttcgccaagcgagttcagcaccatatcgtagttctgaacggcctcatccggatcggccggcgcatagtcaaattcctgggcaaaccgaaaatcttcctcggtcatcgccgccagttgctgctggtcaatatgctggaacaggaactgaatatcgtcgttgtctttgtagaagttccccatgtctatcccgctatcatgagtttcgtaacgttacacgctcaactggcgtctatcctcggcccacggctcctcaccggcggccgaggcgttcctctgtgggtcagtcctttatgctcttctctttgatcgacttgatcattctcggtatgacctcgttgagatcgccgacgatcttgtagtgggcgatgccaaagatcggcgcatcgggatcgttgttgatggcgacgattttctggctctgggccataccggcctggtgctgaatggcgccgctgatccccacggcgatgtagaggctgggccgaactgtcgtgccggtctgacccacctggtggtcgtggtcgataaagcccagatcgaccgccggacgggtggccgccggggcggcgcccaggcaattggccagatcccaaatcagtttgaagttctccttgctgccgacgccggcgcctccggcaacgatgagccgggcggccttgagatcgaccttcttggcccgcttgtgctcctggagaatctcaagcggcagatcatcctgggccagcttgaccgtttcggtgacgatcacgccgtgatggttgacgttcggttcgggcatgggcatgacgccctctcggaccgttgccatctgaggccaccgatcgtagttgatgatcgtggcgatgatattgcccccgaaggccggacgaatctggaatagcagattctcgtggatctctccgtccttggcggtcttatggtcgccgatttgcagatcggtgcagtcggctgtcaggccggccttggcggcgctggcgatgcgcggcgccagatcgcgaccggccaccgtcgcgccgtacagaacgatctgtggttcgtgtttgtggatcaggtcgaggatgactttggcgtagctgttagtctgataagcgcccaaaagcgggtgctcgaccaggtagaccttgtcggccccgtattggatcagcggggtgcaaaggtccttgacgccgtctcccaagagtacgaccgccagcttcactttcagcgtatcggccagatgcctggctttgctcatcagctcgaccggtgtctcttccagcgcgctgccgtgctgctcggcgaacacccaaacttcaccttctctatttacatcgatcatgaaaaacctgaatttgcaaatgaaccttgtgattccaggggcctcaaggcgaagggcccgcgcacagagtgctggtgtacctaagcgatgatcttatcctggatcagttcgtggatcatgtcggtgatgccgtcttcagtcggctcgatgtccttgctttccttggccgcgaggactacgctttgaatccgatggaccttggtgggtgagccgtttcggccgcaccagctcagatccgcttcgagatcatccagatcccagtgcttgattagcaggcctcgggcttccagagcctcgcaacgcgttgcgatcaactcctgcatctcggcctcgaccgcgtccggattgatcgcctgaatctcctgggccacctcaagacgggtacgcgccttcttgcacttcatcaaatgcttggctgcggccacgcgcggcgtgttggtctcgcccgttacggtcaacaggacgggcaactgggccttgacctgttgccaaccgttgccgatattgcggcgggccgtgatttctcggtcctccagggcctctagcgcctcgcagtacgtgatctgcgtgagccccagcttttcagccaattgcgggccgacctgggcggtatccccgtcgatggcctgacgaccacacagcacgatgtcgcaatccagcttcttgacggcgcaactgaggatatagctggtcgccagcgtatcactagcggcgcaacgccgatcggtgaccaggatagcgccatcggcgccccgatagagggattcgcgcagaatccgcgtcgccccgggcaatcccatcgtgatcacggtcacgcgaccgccgaagcgatccttgatctgaagggccagttcgagggcgttcaggtcttcgggattgaaaatagccggcagcgccgaacggttcaccgtgccatcgtcgttcatgacctggccggttattctctgggtgtctggcacttgcttggccagcacaacacagtgatatgccacgtaagatctcctatcagcccttccttgcctgacatttgttttcggaaacgccttagtttaccggccttgacgctcaggtcaaccctaaaacgaaaacacgaagaagggtgatatttccgggccttagcgaaaaactactaaaccgctatgcccaaaaggccgattgagttcacgatggagccgtctccagggcagaatgcgcagtttctttttgacaacggtgtttataaatcgataatgatcgccagcggtggtgttatcggatgtgaccaccggagccgacaatcaggcttcttggcgtaaggatgcggcccctgggacagccaggggatttttacatgacgagtgaaaccagttacgatacggtatttggcaaactggcggttgaccaggggctctgtacggacaaggagctccgcaactccgtgaaggaattgcaggaacgccgcaagatcaatcccgtcatgctccaggaacttctgatcgagttgggctacattaccgccacgcaggctacgcggctcaaacgaagcattcggggcaacaaggcggccgttcaccagatcccgggctacaagattctgggcaagatcggcgccggggccatggccttcgtttacaaggccaagcaactcagcctcaaccgcaccgtcgccatcaaggtccttcccaagcgcttcagtgagaatcccgagtacgtgcagcggttctataaggaaggccaggcggccggtaagctcaaccatcccaatatcgttcaggccatcgacgtgggcgaagcggggggctaccactatttcgtcatggagtacgtcgagggcaagaccatcgccgacgacatcgccgagggcgccttcccggagaagagtgcgatcgaggtcatcatccaggtgacccacgccctggaacacgcccactcacacgggctggtccaccgcgacgtcaagcccaagaacatcatgatcaaccagcaaggcgtggtcaagctggccgacatgggtctggcccgggagacgacggatatcgaggccgcccagagtgaggccggcaaggcttatgggaccccgtactacatcgcacccgagcagattcgcggcaagatcgatatcgacggccgggcggatatctacggtctcggtgcgaccttctatcatatggtcaccgggcaggtccccttcacgggcgacgattcctcggagatcatgaagaagcatctgcgcgagaagctggtcccgccggatcatctcgttacttcgctctcggccggtgtctccgaggtcattgagatcatgatggccaaaccccgcgacgaccgatacaacaacatcgaggagttgctggtggacctggaggccctgcgcgatgggcatccgccgttgcaggcgcacaagcggttcgatgtctccgtcctcgagaagttggaagaaggggagaccgtcgaagcggaggatatggattacgccgaggagaagatcaaccggctctggatggctgtcatggtcctggcagtcgtctcgttcgttgcggtgatgatcattgtgctgatgctggcgttctgaggccagcgccgcgttgcggtcgccgggccgtatcgaaagaccttcccaatgcccagaggaggagccaatttttcgtcggaggagcttgtccgcgtcttgagtcactacgacgtgggggtggttcaccgcgtcaagccgctctcggcgggcaaccgacgggcccccaaggtgatcgtgcgggccgacaagggtaccttccttctcaaacgccgtccgaaaggtcgcgacgatctggcgcgtgtggccttcgtccatgccgtccagaagcatctggccagccaggcgtttcccgtgacgtccctggtgacgaccagcgacgagcataagacggttctgaacatcgatcgtcatatgtatgagttgttcacctttgtcagtggttcgcgctgtgacgcgtcgcccaaggcgaccgaagacgcggggcgacaactggcgaacctgcatcttcggatgggggattttgctcacgactacgaaccgtttcgaggcagctttcacgattcgtccaccgtccggcaacatctcaagatgattcggtcggaccaacgcgccggctcagcccgacggaccgaagctatcaccgaatcattgctgatccgctacgatcgctccagcaatcgcgtcaacaagctgggctacgaatcctggaaacgccaggtcgtccatggcgactggcacccgggcaacctgttgttctttggggccaaggtcgtgggcgtggtggatttcgattcgatccgaatcgcgccgcccctgacggacctggccaatgggatgctccagttctccatcgtaggcgactgttccgatccgacccagtggcccgacgccttcgacgagcccaggctcttccagttcctgacgggctaccgcgaggccgccaaggtgagcaaacgcaagctgcgcagtcttgtcgatctgatgatcgaagcgatgatcgctgaagccgtgctgccggtagccgccaccggttacttcggctatcactccggcgtcgacttcctccagatgatcctccgcaagaccaagtggctccgccaccatcgcaaatcaatgaccgagactattcttggtgtcacagcagccgacaagtgagccgctctacttcttctccatgggcggcagtggaggctgtccaggtgcgagtccgcccatcccgcccatgggcaggccgacaggcggtccaactggcggcgtctcggattcatccagtgtcttcctctgtgcttgagtcaagaccacaagcctccctggcctcggtatctcctgacccagggattcgatctgccccccgtcgatgagcactatcttgtccaggggggtggtcacggacgtctggacctcgacggtgctgatgatcgggaaggtgtagggatacctccccttgtgcattcgctcctcgttccccaagacggaggtgatctttgctttgacttcgagatagacgttgtccgaacctttctgcagatggggcgtggcgttgaactccacgccggcgtgaatcgactcatattgagcgaccggttcccccgaaggcccgtccggttcgctgaagccaacgaattgaggcaccgctcgcccgacgcgcatctccgcggattctccatccaggaccgtgaccatcggggcagcgagcgaacacgcatacctggtcccttgcgtcgctctcaagagaaatatgacttgcgtgtcatccagaagggcggcttcgcgtatccgctctccctcgccaagcgtcagtgccgtcaccagttcctccggcgtgttcggatcttcgaccaaccccttcaggaattcgtcactgacgtgcaaaaaccgcgcctcgatctggaccgcctccttcacttccttcgggtgctgggcggtcgcgtgcggctgtcctgagaacacgcccaccatattattgtaggcctgggcgacggcggcaaactccttcgccgctccggctacgtcttcatccaccgccttccgcaacgcggccagggcctcggccatctgggtgacgcttgcgtccaatggggttcccttcgccagggcggcggtctcggcggtgcgcgacaaggcccgtgcgacccactcgctcatctccgcctgctctgggcgacctgggcgtgtgagaacggacatagcgctgaacatcgtttccttgaacgcctgggcgagttcggggcctggaggccaggagcgggcggggccgctctcagagggtgcgatggtgatgtccatgggcggactgaccgcgcgaatcgggccgcctgttctcacccgggacgactccacgatgaccgccagccgaatcgtgtgtttgcccggtgccagttgcagggacgcccgtctgtaggtcgggtctacgccccaggcaaagccgtcgtctcgccattgcagatcttccggtttcgccttcgaccagatgggcgagagggtgacaggctgatcggccagcgactgtcccatgcccagaccggccagacgcacggcccacgagtcaggcggccatatgtaccagacgccgtccacctccaattgcgacctgcgctgtccggtggccaagtgcagaaattcccgcgcgccgacattctgtacgtcccagcgcaaagccgggatctcatctgttcgccaggtgtgtctgtccgcccgcaaccgaatctgcacaccctcctgcgccgccgaccagtcggtttgcatcgttgccggtgtggccgtcaccgggttcgctttgggttcgactggcagcacctgggctcggaccaggaggtagagaacgtcgtcctgctcaggttctcccgtctcgggcgtcagacgcaggacgagggtcgtgtcgttgtccagggtggctttggtgcggatgctgtgtgtgctcacgcgaggcctctggtcgtcgtcggcggggatcatatccgagacttcgacggccatctccaaggtgacttggccgctgctttcggcatggggtgtgacgctcactacggtgccgtactcgatcatctcgattgccggcggcgtgaccgtttctcctgacgcctcgcggcccaccggttccggcgcttcgtaatgctcctccgtgatgatcctgacttcggcacgcttgccgtttatggcctccaagcgaggtttggaaaccacctgcacgtattccccggattgcagtagatcgcttagtatctcaagtgcatccgagtctccctggccgttctgggcgcagcgtttgaagagctgtgccggtggaacttgtagttcctggatgtcaggcagtgatgcgcgcccgattcgtgcgacctttcgcttcccgtacatccgatcccacagacgcgatagccggttcgccgcctcacgagttaacgggcggtttcccgaagtgtccagaatctcaaagtccaacaagatccgcgtcttctcatcgattgaggacgcgctgtcgtctgtggcttccgtcagcacgcggatgggtgtcgattcgctggattcctccttttcaacgacgggatcatgggatgattgctccaattccttctgcctctgctcaagacgctggttcagcgccgccagcaactgctccttctcgacgattgtggggtgttttggcaccaggttctgctgagcagcgatgaggtccacttcaacctcggcgatcttcttcgccaattcctgggccatgggatcgataggagtggattccgattcctcacggctttgcgcgagacgccgggcaatgccggcatagaccccttcctcccattcccttcgccgctcctcaagacgcttcttcatcgccccaagcagcgcctctgtccgagtcagttcgggatgttttggccccaaagtctgtcgggccacgatcagttcttgctcgatctccacaacacgcttcagcaaattctccacgacgggatcggagttcacgtactctcgacgcgcagcgatcatcccctcgcctttttcaagaccggtctctgggaccaggcgggcggtcacgaagactgcgatatccttttctgaatcgggattgtttgtgccgactccggccacaaccaccgtgccgccatctttgattgtcacgacatttctgctggtgcgacgggtcacaacaggcagcttgccaccttgggccggagggatgctgtcactgtattcgagggccagttccagtatgatttcattgttgtcggcgatcctcggcatggccgaaatcaccgtcccggtcgcgatgctcacgcgttccggttgatccgttgtcgcggccggcggcatcgagaactgctcttccgtggtggcggtgacgcgggccagtcgcccgtcgattgccacgatccgctgtctcgccaccaatcgggcccgaccctgttggcaaagtcggtctagggtctcctgtacagagttcgtaaaggcctcgtcggctgtatagcctatctggacaccccagggcgacccgcttgctgcgccggacgcggaagccggggcgttgccgaaagctccggcgctgatctgcggggcactccattcgacgcccagatccgcgaggtcgctgcgctcgatggccacggttcggaaatccaacaacacctgacgcggacggttgtcgctctggtgggttgatgggacagacagaggctcctgctgagccgcagacttgacgatggttggcttgaccagcaggagaacaatgctggttcttgtgtccagcctttcacttgccggttcggtagtgacagtgagaggatacatagcgtatttgttgttgcggaaggttgacgttatgtcgaacttggctccttccatcctcatgcttacgttgccatcgttgtcgagttgcgccaagctccgaatatggaatcccaaagacaacctgatggtgtcctggtcgtcctgaaccgttggcgtgacgtccaaacgcaggcctataccctctgcgttgtccgaggaatccggggcatctgaattggggtcctcaccaacaattatcgaggcgggtcggccgtcgcgtgttacaatatgcggtctgctcagtatctctccatagcctctcgatattagcagatcggtgaacgccttggcgccgccggcagtcaggttcaaggagttcgtgtatttcttgaggatttgccagagtggtttctggagttcctccacggttggcagggtgaagtcgtcattcactacaacatctgcaaggagattcctggcttggacggccgtttcgtggtccagcgttgcgtcggaagcgaccttggcgatgacaaagtccaacaagacttgcctggcctcctggggcttctcggtggccaccgtcgcagccggcctctcgactggcaactcggggctggccaggacgagggcggtggggatgatgatggtggcgacgaggaggagggcgatcaggccggggagccaggcgaagcggcgctcggctggggtggggcggcccaggaggcggccgatgcgggcgacgaggctgcccccgttggcggccaccgccagttcggtcccgtggtggcgcatttcctccaggcaggtcagggcgcgggcatagcggaccgaatcgccacacactccgacggccaggtcgtcacagcagttctcccgctcatcccgaatttggcgcgagacccaccagaccgccgggtggtagaagcccaggatttccacgaccgattgggcgatattgacgagataatcgtagcggcggatatgcgccagttcgtgggcgaggatcgcttcgagttgttcggcttccaggcccgtcagggcgctggcgggcagcagaatcaccggcttgatccaccccacgacggtggggacgtcgacaagcgccgattccagcagttcgaccgcttggcggacgcccagacgctcggccagttctccgagtttcgtctgcacaggggcggcgacctctcgcaccatgcgccgtcgcatccgctgtagttgggcccagccgcccaggtgccaggccgagaggccaaagacacccagcagccagcccaggaccagccagggcagggccggttcgagagcggaagcgacccgttgcctccagggcacgcgaatggttgcatccgccacctccaggaccggcgcctcgatcggctcgacagacaactcggccacctcgattacttcgaccggcggtacctcggcgatgggcgctggggcggtgacaggacccgcctccgcgacgggtcctgagacctccacaagctgcatcgtaaccattggcagtgcgacgattagcgccagtgccaggcatgagacgatgtaccgcaggccggcgcttcggttgctcaggaatctcaggacgacggccagtagcagggcgatagctgttgcttgccagacgaaatggatcagcgtccagcccagccgctcgaccatcccctgcgacagtagttgctctaacgttgccatgactatgctccctccatttggtccagcatctcgcgaatgcgtttgagttccttgggcgagaccttcttggcgtccagggcccgcatgacgagcttctcagccgagccggcgaagaccttctccagcatgtcgcccaccacctgtttctgagtacgctcttcggagaccgccggtgtgtagatgtgctggcgaccggcgcccttgcgggtgagcaggcccttctcggccatgatctgcatcagcttgagcgtggtggtgtagcccgtctcgctgttggcgcccaacgcctcgtggatcgcccgaacggtgctggggccgcgctgccagagcacgccaagtatcgccagttctcgatccgtcggtccggggcgcttatgtcttgccatgagggtctccttggtcgattgtttttccgcatcactatctctatcggcaagtatacgaaggaattcgtagtaaatccacgaaaaaattcgtacttcgcagaaaagatttgtgcgatctcatctcacgaaccaggaaaggctcataccctataggcctctgtcatccttgagccgaaggcgaaggatctggccttggaatgaggggcaaccttcgtacgcagcccagatccttcactacgcagagctgcgttcaggatgacaagcggcgtatggactggccacaatccacgccatagctcgcctccttgcccatgaaaaagcccccgccagactgagtcgggcggaggcttctgtgttgcttgtggagaggtggttagcggatcgtgtggaactcctcaacctcctctgtctcaacccttttctggctgcgttcgaggagttgctccaggagctttcgcatctgcgtcatctcctcgtgcatgccgttgatcttgccacgcagttcttcgacctcgacctcgatcccgggtcgttcccgcggcgcatcgcccagtcgcctggtctcgccttcgagcgactcacggcgctggtgctgtgaatcttccagttgctcctcaacgtgaatcatctcttcgtggaggttgtcgaggtgggcgcggagttcgcgagccttgtcgctgtcggggtcgtccattcgttccagcctgtgcttcacctcggtcccgtgcgcctgcagttcgtgcaaatgctccgccagtttctgtgtatgctcgtgtgctccggcggcccgctgttgatccaggtgggcgtgctcgcggtccagtgacttcatgtgctcgtgaatctcgcgcagctcgacgatgatctgttccctcttctccgacggcctgtctcccaacgcctccaactcccgttccatcagacgcatcttctcgcccagttcttcctggtgccgcgccaattccctggcgtgcgcctcggtgtcgtggagttgctcggcatgcgcgcgccggtccttcaaatcttcttcgtgtgtctcgttctcctgcttatgtctctcgttgcgcaaggcctccaatattttctcttcgtcggctattcgcgcatggagttgattgacctggtccttcagtacgcggcccgtccggctgtcagggtcctccatatactccaatcgtcgcttgacctgggtgacgaattcccgatcgagttgcaggcgttcggtcagttccagttccggcacccgctggcgggcctcgtcaggcagatacagctcgagatcggccaactcctgttccatgggctccatgtgttcgtggatctctcgcagttcggttgagagtcgctctcgcttttcggactgctcttctcccaaggcttcaagctcttgctccaaagggcgggcttgcgccgccagttccccacgatgccgcctcaattccacgaaatgcatcgcgagtttctcggtgtgttccgcccgcttgcgccgcgcgtcggtccgtcgtgccttctgcaggctgccgagctgtcgctcgatgattccaatgtggtcgcggagggcgtccagttccgagcgcaggacgtgaccccgggcgcccggttcatctccctgtgcgtcgagggccgcttcggtctcgcggacctggtcgacgagttgatcgagcatgcgttccagcacattgcgccgcccggcgaccgccagttcgtgttgctcctcattatgctcgtgctgctctcgaaactcttggtgctcggtctgtccgtgttggtcgtgctcggcgggtcggtgttgggcgaaggccacgcccaccatgccgaccagcaccaggacgcagacggttcccatccagcgcgttccgattctcgggtctccgcattcctcgctcacgattctctgaattctctccttcatcgctttctcctttcccaggacggttggcacaaacgccatttctctttggggtgacaaatcgagcagtgactcggcgtaatcgacgcccgcctggccgctcgccagcacccagtcgtcacagacttcttcactcagtttcaacaatcggctcttggcccaccacagcagcgggtgccagggcatgatgcagaccatcagctcggccagcaatccgctgagatggtcgagccgcttccaatgcgccagttcgtggcagaacacgcccgccaggtcgtttgtctcggcggctctggcgatatcctgctgcaccaggagcaccggcggcttgcgccaacaccagatgaccgggctgcgcacgtcggtgctgcggcggatctccaacgcgacgtttaggccgaatcgggctcggacgctctccaacgtctccaggagtaacggggcctcgaccggttcggttttggccagcagtcgcagtcccaggccgaatcgcaacaacagacgactcaataggaggacacttgccgcgatccaggcaactcgcaagaccgtgctccacggtatgcggacggctgttgtctcttcgacgggggccgagactggaaccgccggcgccgtggcctccacagccaaaggttcgtattccaccacgccggcgactggtatggggggatcgatgttactgagcgggcccggcgcgacgaactctagcggttcagaaggtgcgggggccctggtggtcagtagacccaactcgaagtgctgcaccgagacgtacagagcaggcatcaccaccgaggccagcaagccgaccagtaggatctggtgggcccgtgcggcccggcggcgccagagatagctgcccgccaggcccagtccgagacaggtggtgccttgcagcaggagcaccagcccgagatggttttcggagactatctcgcccatcatttccgcatctccttcttcttctcgctgatcatcttcctcaggtcgccaagatcgtcctcgctcagatcgctctcgcggatcaagtgttggaacatggcgatcgcatcgccatcgaagacgcgtttgaggaaccccttcaccgaaccggcgcccgcttcgtcccggctccgcgtggggaagtagacgtagctcttgccgtcggggcggtggctcagccagccggtcttttcgagcttctgcagcgtggtcaagatggtggtgtaggccagcggcttttcgcgggccagtcggtcgcgcacctggtggacgctggcctctccccgctcccagacgacctccatgaccgcccgctgcaactgccctagtccgtcgagtgaatgcttgctcatcgcatgaacctccttatctttccgctgatactcgtcctacggttgactatcgtactatgttctatagtaggtggcaacaaaaaagaaaaattctctcagcaggggcggcgcaaggcaaaggcctccgagaggggacggtctctcggaggcccgagtggcggctatgggcttgtttgggtgcaggtaaacgcagcctgctaattgtactagtactgcccggcgctgccgaccgtgctcgggtggtcctccagcagcaaacgctccaacagttcgttggtctggcactgttcggccttcaattgctccatctcctcgcgcagctcccgacagaggtcctccttcgcctccctctcggcttcccgcacttctctgagttccaactccattcgttcgagctgttctttgtgctcaagctcgtgggggggcgggcccatgggccggtgcttcggcggacgaggcgccggggcgtgatgacggtggagttgcccctcgatctcgcggatctgcgcccgcgtctcatccagggcgcggcgcagctccatcgcttcggcgtcttcgtcccccatctcctcgagcatccgttgcatgtgctcggcccgctcctgcagggcgtgtagatgtgcggtgagttcctcgacctcacgccgggttttttccatcaggtggcgccggcgttcctgttgctcacgttcgcgctgggccaatgcttcctcgatgcccttcatctgctcgtgaatttcgcgcagctccatgtggacttcgtgacggcggcgctcggtgttctcacgcaactcttccaactccatctcacgctggcgggcccgctcggcgagttcctcgcgacgtcgcatgagttcttcgatctcttcctggataccgcgtagctcggcgtggatatcgcgctggcgatcctccaggttacgctgaagctcttccatttccatctctttgtggtgggccgcttcgagaagctcctcgcggtgccgcatcagctcttgaaggtgtcggtcgggctcacctctcggttccggcggcgcttcccggcccattctcgccaagcgatgctcgaccacttgagtctctgcgcacaactgttcgagtttggcctgcagatcgtgtttctcgtcgttcgtttcggtgtccatctcgcgcaggcgggtctcgatctcattggtttcgttgacaaggcgatctaatcgtgcggccatggcctcgcgatgttcggcctgctcgcgctgctcttgccgttggattctttgcatcgcgacccggtcgtgttccggatggtgatattgaacgtactcggtcgttgccttgtcgcgcgcgaccacatcgtgctcagggctcggcggctgggcataggccgcactggccaggaaaagcagcgccaacagcgcgatgatgaatgcccagggaatcccccttcggcggggcgcacaaacttgttctgcgatccttcgaattctctctctcatgactctctcctttactccgatgcgttgggtgggaccccttcttagcctcccccggtaagcgcgtgacagtgtctctctctcaaagcgaccgtcgacagcgtgggtggagatgctcggggtgggtttgacgcgaaggcgggggcctcgatcgtcccgatctacgtggtttcctcacatccatggcgctcctcctgagcggttcttcaccagaccctcctcgatccgactaacgttcaggattcacccgtattctaccgacacccatcccgggcgtctacctcggacaatacgtatttttttatctctcggtgcggcccatcccccgacgcaaagaagacagcccccacgcctctgcaagcatgggacccgtcataagtcattgttgagaagagagttacggtgtgtccttctctcgtctccaggccgcgacgcctatttcgattcctcctccgtaacaagccaaacctccgccggttgcgtctggatttcgaattgtaactcggtctgggccgtcacattggccagtagagcctccagtcgtcggcgtttctccgccatatcccggatggttcgcaccaggggcttgcgcaggtagacctgaaacgggatgatcgtctcctgctgtcgatctgtctggtcaatcattgttacgccgagcatcggtccgagtctttcgaggaactcgcccaccgatctggctccgtccatgaaccttccggcttcctcttcgcgcgtgggctgcgcttcgcccgcgaagatgcgaacattctcatcatcgaacaccgcgtggaatttgaattgtcccgttgcgatgacgacggcgtgctcggcggggcgctttttgaatcggatcgtgcgtcccatttcctcggtgaggagggcctccatcacgcgcagtttcgcctcccgaggcgcatcgctgcggacgatccaatcgcccggtcgttcgaggttgagcagttccttggggccctcatattcgtgatcctgcagtccgaccacatcctccagcagccggtggatgcgagatgtactgttgatgaacgacatgccacgtagctgcaatccaccatcccagtggaaacggaactggtggggcggttccgtcttgcgtgactccggttcgctcgcttcattgatgtaatagtccttccgttgcgggatgaacggcggaatgatgcgccgcaggatctcgccgtcctccaggcagtagactctgtcgaacccttgtcgccaggccggcgtggggagggcttccggttcctcagggggcacgcccagcatggcactgatcatctctctggctgcgttcagattcagagagccgaggacgtttccggcagggccgatcaggacgttcgtagaccaccgtgtgatatcgtatcgtccacaggtcgcgccgggacgctctctgcccgaaccctcatagaacgtcggctctccgccatcgatcgcaatgcggaaggggacatcggtcactccgccaaggcgttggtaggtgtcggtccagcgtcgctccagctccgccatcgagtcgcagttgtagatcgcgatgatggtcaggcccttgtcgcccaaggctttgtgaagcttcaccagtctgggcagatcgcgcggcacgctgggggattggccgccaaagtgaagcaggacggcctggcctcgcagttgggccagtgttaccggcccgccgttcttccagctcttgatgggccccaactgtggtgctgctttgcctatcagctttgtcagacccgtcggctcgagttccaccgtgccgaggtctaattccgattggtccttagggatcgtgacggtcagacgcttgtccctgagcgatgccgtgataggcgctgggatcccgttcttgccgcccgaaccgccaaattccaggacatactcgccgggtggcagcgggaagtcgaagggatacggcttcttccttgggtccgcgccaattacgacgttgtcggaccaacgcacattcgcggtggcccatcgcaatggcatgttcacgctctccaggtctggactgccaacgttgccgcgtacccgacagaccggtgcgagtcggatggtaaacgatttacctgcgtcggccggcgccagttcccataccgcaccgagaccccgctcctcgtgcaggatataaagccctcttgtcttccgtcctgctgggaggacgtccttcgtttggaagcgaaccgacccaccctcgctggatgtttgctcgtcgatccattccaacgtccccccgagcatgtcttcgcggaatgcaaccgacgtggagaccttcgcccccacgaccggcagcctgtcgtcatcgaccagtcgcaggaagatttgactcggatcgaggaggctgttcatccggattccggctgtttcaccaacgcccggctcagttaatgcggtttctagcaagaaaacccccaggtcgctcaggtgatccctcttcctatatctgtcctcagcgcgggccggcagaatcgattgccatgggctcaactccagatacgcctcgcctgattcagcagatacgcggtagatgtacttcgtgcgtacggcgatgttatcttgaatccccgtcccatcagggattcccattccggcaagcgtgaagcgcttcgggtccactgggacattcggatgaaactcggtgagcttggcgactgtatgatccgccagagtcctatcgtagagccaacgccgggcttctgcacgccgataccagaagacgccgttaccgtagtcttctatctccatgacctgctcacgaagcagtctgtcgtcgcgcacaaaccactgaaactttgcgatggagtgcccctttgccggcagtacccagattctgtatatcgagccatcggcatggctctccagatgccattccagaagcaggcagggctctccgttgagtcgtgactcactaacggtggggagatccccacgcgccgccagaaaacgggtgtgctgctctagggtgtcgatccactcgccaaagcgtacgtagcgtagcagcgtgggtccatctccgcgcccagtgcgattcggatcgtctccggctgtgatccacgccatgtgaccgtcgcggtcagagtcccgctgtaactgagtggtgacgatccggttgccccgcgtgatgatcacccgatggttgtccgaaggcgtagcgatgtaggatgatccctcctccgttgagtgaatcagtatttggcgcggcccttcagggtctggcgtgacgcgggtatcgacgcgggccttatgcccgtcaaaccactccgagcaactctcccgccacaagagggttcccttgtcctttgcgacatctctcctttcgatttcgagagttgcccgggcgctcttgagcttgctcaacgtacgtgtattcgcgcggatgatacgctcaacttccttgggcaactccacggccggcgaggcgattcccgccgaagcccaagtgggcggtgctaccgcctccgaccgcgtttgggcgaaggcgatggtgacagccagacacgccgcggcggttgcagtcgccagagaccagcgccggccactgtgaggactgctgcactggtcttctacaatccgccggatgcgaccggccagggttcgcttgcttgtcaccacgctcagtgccaaggcgctctggggttggaccgacagattcagcagggtgcgggcgtagcgggtgccggtctggccggcggcgatgacccaatcgtcgcaggcctgctcgctgagctgcttcaggcggcgctgggccagccaggccagcgggttccagggcagcacgcagagcaccagttcggtccagaggccgctgaggtggtcgcgccgcttccagtgggccagttcgtgacagacgatgccggtccagtcgatacctttgccttcgcccgccccgtgcggcacgagcaggatcggccggacgccccaacaccagatcaccggactgcgcgtctctgcactctttcgcagcagtacatcagtcctgaacccgagcttcgtcttggcgctttcgatggcgcgggcgatctcgtcgacgttgcatggctcagaccgctgggccagtcgaaaccccagcagaagacgcacgaccaagcggatcagcagggcggcgctgaagagggtccagacggccaggacaagccttgtccattcgataggctgagccgttgccgttgccgtcgccggcaggacgggcagagtcgcctcagaaacgctagcctgatcgatctctctgtcctgtgtcgattcgacggtagccggagcgtccagggcgacaaacgctggagggcgaacctcgaccaccaccggtctggactccagcatgccccattgatgctgcttgactacctggctaagcacaggcgccgcgatcgccgccaccagcgccaacagcaaaagctgatgagcccgaaccgctcgtcttctcaggaccagactccctccaagacccatcgccagggccgccgtgctctgccacgccagcggccagagccacgcatgttgcaccagtatgtcgccgatcatggtttcctctccgcttgctctgtctctttttctttgatcattcgcttcagttcgccgagttcgtcggcgctgagattgccctcggtgatcaggtgctggaacatcgccagggcgtcgcctgcgaagatgcgtttgacgagccgctggaccgagccggcgccggcctgctggcgggtctgggtggcgaagtagacgtagcttttacccgcagcccgatggtccagccaaccagccttctccagcttctgcatggctgagaggacggtcgtgtacgcgagcttcttctgacgggtcagacgctctcggacctgatggacactggcctcgcccagttcccagacggtctccaggacggcccgctgcagttcgcccagatcgtcgagtggtttccgcttcatcgctacttcctcctgaacgtgaccgctgtttctcactactccaatacaaagtactccatgccgtagtaggagtcaaatagaaaattaaaatcctctcaaattttcttttccgggcgacgcaggatttcacttgacggctcctgttccatggggtaaagtatatacacaacgaaactattgttgagatataacgatgaataatcactcatcaacaatccatcatcgatcaagcaggaccctgctgtgctggccgagcggcggaaaaacgggcggatcgggggaggtttattatgcaaaacaaacccaattatcgttgtttttgggccaggaatgcggatcgagccgggaaaacaaagccaaacaaaccgaatcaaagccaattggggtggcacggcgactatgcggagagccctggatgcgtgtctcggcgagaagcgaattgacaggcgaagggaaacaccgtagtttagggcagcctaaaaatgagtgaccacccaacacaactcagcgacagtctcgaggattatctcgaagcgatcttctggatcgcctcgaagaagggggcggcgcgggccaaggatatcgccaaggcgctgaaggttcgggccgcttcggtgaccggggcgctgcgtctgttggccgagcggaagctcattcactacgctccctatgaggtcattacgctgacgtcggaaggtcgcaaggaggccgagaagatcatccagaaacacgaggttctcaagggcttcttcgtcggcctgctgggcatcgacgaggacctggccgaagagggggcctgccgactcgaacacggcctgcccgatccgattatggagaggctactggcgttcaccgagttcgttcagtcctgcccccggtgtggggaggactggcggcggcaattcctggatggttgtacggcgcgtcgcgacgcgccttgctcagattgtctgaaggattgcctggggcgtttcgagcggggcgaatcgcagatgcaggccaccgccggccggcccctgacggagattcagccggggagcaagtgcatcgtcaagcgtatccggaaccggcggacggtcgcccggcgcctggtggagatgggggtccagtgtgggacggtggtcgaggtcaaggccgtggcgcccctgggggacccgatcgcggtgaaggtgcgggggtaccatctctcgctccgaggtgaggaagcgaaaaacatcgaggtggttccggtatgagtcttccgtctttcgggggatcgtacggagatctttcacatcttcggttcaggacggacggggcggtggaggtatagatagatacggtggggagggtcgtgtcggaccacttctgctgggcgagtgaatgaaaacgggccctgaaccaactgattcagagcccgtcgtatacgatcgaagaggccggaggttactcggtttcctgcgccttcttgtgcgcggcgacgatctgctgctgcacgttgggcgggaccggctcgtagtggctcagggccattgagtagctgcctcgtccaccggtgacgctcttgagctgtccggtgtactgggtgacttcggacagcgggacctgggccttgatgacgatgaagttgccgggcagcacgtcctggccgatcacgcgtccgcgtttggaggacagatcgcccgtgatgtcaccgacgttgtcggccgggatagtcacttccatatcgacgatcggttccaatagggcgggcttggccttctggatcgcgtcgatgaaggcgcccttgccggcggcgcggaaggccacttccttggagtccacgggatggtgcttgccatcgtagacggagaccttgatgtcctggagtggatagccggcgaccacgccggtgtgcatcacgtcgttgacgcccttggcaatcgccggttcgaactggcgcgggaccgagccgccgaagatgtcccaactgaactgcatggggggctcactgttgcgctcggtcggctccacccggagatagacctcgccaaactggccggcgccgccggtctgtttcttgtgtcggtagtggccttcggccttgcccgtaatcgtttcgcggtaagggattttcggttccttggtgttgaccgaaagcttgaaccgcttttccatcttctcgagcactatccgcaggtgcaactcgcccaggccattggccaccagttccttggtctgcgcatcgtggctaatcttgaagcaggggtcttcctcgcacagcttctcgagggcgccgccgatcttctgttcgtcgcctcgggaagccggttccagcgccagggagaacatcggtgacgggacgggcaacatcgggaatgagccggccacctggccgccatgtacgaggtcgcccacccggagttcttcaagttttgccagcgtgatgatgtccccggccacgccggcttcgacttcggtgtagtcggttccctgagacttgaggatatgtccgggccgcagtcccttcttatcgttattgtgcatcagggtcgtatcggacttgagcgttccgctgaagaggcgaacgctcgagtacttcatgttggatttcggatcgaagcccacccggaacacgagacccgccagcggaccggccgcgtcggccttcagttccatgacggtctcaccatcgattagcttcgccggatcagcgtcggccggcgacgggctgcattgagcgatcaggtccaacaactccgtcacgcccacttcctctcgtgcctcggtgaagagaatgggcatcaccgtccctgccttgagcgccgtgacgaagaccgaggccacttgctcggacgagatttcctcatcattcaggtaacttatcatcaaggcatcgtcggcttcgatgacgctgtcgatcagctcggtgtgcgcctgggccacatccatcacgggggaatcgccactgtcattggtgatgcagtcaatgacagaccccttatctgccgagggtagattggcgcaggcgcagcggcactgcgagccgaaggtttcctggatcgtctggaccagttcgcccatctcgacgttctcggcgcccatcttgttaatgacgatgatgaccggcttgttcgcctctcgggccagttggaacatcttgcgggtgttggtctcgatgccggcggtggcgctgatcacgagaatggtcgtctcagcggcggggatggatgtaatagccgggccggtgaagtcggggtaaccgggcgtgtcgatgagattgatcaacttgccgccgtgctccacgtggacgatggctgagaggatagagtgctgatgctccctttcttcgtcatagtagtcacaggtactggttttgtcgtcaacgctccccaggcggcttgttacgccggttttgtggagtattgcctcggccagcgaggtcttgccgctgccgccatgtcctagcaggaccacgtttcgaatgtcgcctgttgctgccactttacaacctccaaaaaggttttctaccgcgtttctcttcctgcctccaaaaccctgaatgttataagaattggggcggtccactcaagaggtttttcgtcaaattgccgacttgggcctgttttacacaggaaaaacgcaaatgtcttggccgatggcctgtggttggagcgcattggcgtagttaggtgagggcaattcttgacgagaagacccgcgttagaggtcctggacgaggcggtgtatccgctcgtatagggggatcagcaagggcgtgacgatacagcctttgcaggtccaatgaaacagggtttcctgctcgtaaatggggaattcgttcggggcatacggctgacggacatactgagcgacgcaacaaggggggtagccgaacaggaatccctcgattctgaccgtctcggcggatttgtccacggggaggttatcgaagtgactggcgtacgcctcccggtaggccggggtcctgctgaagatggtttccgtgaacgccttgccggttcggaccgtgcgggacacctgccggacctgcaggccgctctgttccagggcctcgaggccgggcttctccagggacttttcccagcggctcagtggcttgagaccctctcgcgtcagcagggccagataggccagttcgaaatcgacggttttcagataccggagcgcctgcgctattggacgagccaattccgcctgcatatcagttgggcagtcagaaggggtcattcgtcactggcctcgatagagttctgccaccgttcggcgaataccgccaggtcctcgatatcgaccttgcagtccctgttcaggtcggccggctgatatagggtgcccaggtctccgcactcggagggtagctcgaggatcttcagcagacccgctacgttcgttcggtccgcgccgtggatgtcgctgaggtaactaaatgagccatgttgcatgaaatgccgggcgatttccggcacatccattgatgttcccgagttgggattgacgatttgccagtaccccatgttgaccggttggccgcagatttcacaccattccaggcctctcaacatgtagttgattttatacacgcccttggcgtcggggctgtcgggctcgaggatcggcaggtgatcgatcacctcggcgcaccgttgggccaattgaattccatcgggcaagaggttttcgtcctggtcggcgtcgtagagattcagtccggccgccagttcctcgctgtcggccaataggtctgcgtccaggtcattcgcatccggggcgatccgctcggcggatgccgcagtgtaatccagtgacagttggtggtcgttgggctcgtatgggaatcgaagctcaagtgtcctggcgagcctggcgatatcgaggcggcctcgatggatgtccccggcatggctgaacgatccatgctccatgtagtgcgaggcaatgatgggaatatcgaggttgagtcccaaccttgggttgatgattcgcacagagcccatgttaacagtctctccacagacgtcacatgtctccagtccgaacaacagccactcttccttgcaaatctgatgggggctcgtgacctccgccttcaagggcagttctgcgatgacttgcgcgcaccgcatggccaactcggctccgtcggcggcgccgttgttgttctgatcgccttggaatggctggtgtccgagggcgacttcttcgcgatcggccaggaggtcggcgtcggcatctgcgtcgagggcgacctgatgcttgtcggccagcgccccgaccggcggatcggccagcacggcgtgggttgccaatgataatgatatggcggtcgccgtaccggcggtgaggacatgacgtctcaaacgtcggcctgcttgggcgtgttttctttgggttctcttgagctttctcatgtcaatcctctctagggataaccgttcaccgcaacactcgaatccatcggcattgtatcataaggacgaggcgcggtccagagaccgcgccgggaccacagcgttgccgccggttcttatgaagcgactcggtttcgcctctgctctcaaatacgccgattggtaaagagcgtttaaagggaggtcggcaaaaagtcgtgggaacgtcaaaaaaaatcggctgctctgccgaccagtgtcacgattgattttattggacagttgcagacgtcgccacttgagaccgaattgttgatcaatatgttgtggttctggctgcgagggtctcctatgtcgtggcttcggttatggggcgttcgcctctcggctttggaggtgactaaagaaaagggcgccttcctgccgatatgccacaagtcttaagggcagagcacgacgggttattttaggatgcttgaggatggacaagaacgaactgattgactgcatttgcgaaatcaaccgcagcgcgaagacagaatttctcgcccagttctcggaagaggatctgaccgcctacctcgagcatttgatggaactggatctgcacgagttagcggtctgtagctagctgccggtctctgacgttgtctcgccgccgccctcggactatgggtgggctgatgtcgcgatgcccggtgacatcagcagtatcgtcccctcgccaggctttgtttctccccccgcagtagccattgcgtcgctgaacttgacgccagagtcccctccgtggtcctcgttacgatcgagggcgctgtcggtcaggagttgaccggccaggttgaggcaggctgccgcacctgccttcatcgcgaggccggcggccgtgcgttctagcgcgatccgtcgcgggaaggggcggcctctgagtcgttctctttgggcttgaacgaagcatcgaacgagatcggctgtggggcctcttcttcggcgaccggcgccgagagcagttcgagattgttctgtttgaaaccgagcagggttgggaccattggggtcggtacgtaaaaggcaaaatcgatctctatggctttcttctctttgtcggagctctgaatcgacatcacctcgtggagcggcttaaattccaaccgccctttagcgccgatgtagccgatgggatacacagcttgcccctgtccggcgagagggtcatcggcgtcggctttcggaacgcaaaccacgcgcagttgagagagcgtgaactttcctgcgtcctgcagcgcgttcttcctgatcccgacgcgtacgagcatgagcttctcgccactacgagccggcagcgcctggccttccgtgtcgcggagcgaactgggggcctcccagacggccttgtcggacacgctcagcgcgggcttcgtcgtcgcggccggcacgtccttcttgtgccgattcagatggagttggtcgacgtaattggcatgcagaacggcaaaactcctgggcttgcccagggccgcaaagctgcccttgctgacggtcccaaagaagccggcgatgaacccgtcgggactgagcatgggcttgttcggctgggccgggtcgatgttccgctcgttgaaccgtgcatacggatagctctggggcaggggggccgtcgccaaggccagcagcaggttgccggtgatgatatacccgaggatgatgccgcaaaccacgcgtccgatgcgctcgggccacaggccgagttcaaccttttccttgccgatctgcatgacaatcgtctgtaggattgccaaggccagaacgaacagcaacaagaagcagatcatctgggcccaggcggcgatggcggccgagtatttggccaacatcgtggccagcgtctcgaagaatgcacaggccacgaagctggcgaacagcgcgttgaagatcaacgcgagtccttgcgtcagggtccccttgaggtatagaaccgccgcacagcccaatatgattgcaagcattaccaaactgaccattccacgttctccgttttctcagggatgccgaccgcttcgaggcggcaccaggatgttcttacttggctgcggggcgccccggtttcttgcccgacgagagcactcggagcacttcgttgatcgcggtttttccggcgatcacctttctgagggcctgctcctgcaagtacagcatcttggcccgtcggaattgcatgccgagttccggcaactgcttcacctggcggatggccttgcgcagttcgtcgttgagtacaatcatctcgaagacgccggcccggccgacgtagccggttccctggcactggtcgcacaccgaaggcttgcctcgtttgtcgtagacctctttacccggacgatacagcaccttggccttttcggccgggaggttgaatttcttcaataactctttgttcggagcgtagccttgcttgcactcatcacatagcgttcgcatcatgcgctggtcgctgatgccgatgagggtctcggcgatcaatttcttgtcgccaaccatcttgatccatttgcccagggcctgcaagacactgtcggcctgcaggacgacgtagacgagcttgccgtcctgggcggcggcgctggcgattttggcggtctcggcgtcctcgcactcgccaatgccgaccacgtccgatcccatcctcaccatggactggagtttcgtcgcatacgtgccggttcccgtgtcggtgggactaaagacgtgctgagtgatattgagcagttgcgtcgccggctgtttctccagcgtattgatattattaagaaaggcgtcgtgatgtcgcaccagggcgtacagcgtcgtcgtgattccgctcttgcggggcccggcgatgaggaagagcccctgagttttctcgcgcatatggtccaggtgttcctgctgatcgggggccaatcccagttcgccgatacgcaagtcgtgttctttggagacctgtttcaagcggacctgctctccggccgtcgagccggcggacatcacttcccattccacgttttgcttcttctgtgccgtgcggaatttgcccttttgcggcttgcgcttctcgctggcgtcgagggcggccagttccttgaggaagtggataaggtactccatctgttcgcgcgggacggcgggctgcttggtggcggccccgtcgatgtggtaggtcacctcgtagctgtcgcctttgggagcgaacatgacggtgctggctcgacgccacatggcgtctgtgagcacgtcgtaggcggttcggtagccgaagaacatcggggtgcgcggctcgggagtcgggacttcgttgttgttggcggtgatgaactggaagttctccatcgcctcgagcttttcggacttggcgaaggtgtgtttgatatgctcgatcgtcaggactcggtcgaaatcaagcacgcgggtgttgcggtgcctgacgtaggccagccccgtgccgccgacggcggccaggaaagccagcaatccgacgatgaagaccggaatcagccaccaaagcaggatgcctagggcgccggctccaacgatcagaccgatccagaagccaatgtttgtgtcgactgcttttgcatccttgtgggcccaggtcaccagcagaaaccagaggaaatacaggatgaggaaggcaatcagcttgacgattgagacgtagccgccgtactcgatggacattaacagaaaatctggcattgaacgctccgttaccacaaagttgtgaccgcgcgatgaacggcacgcgcggtcttcgcgtcattgactaaaggatgcctccggtggttgttcgaatccccttcagcgccatcttgagttcctcggtgtttggcgccacggggtaggcgtccttgggatcgacccatccgtcttcgatgagtttgcagaggctgtccgtcaggtcgaccatgccttcgcgctgggaccctcgaatcacgctgggcaagtcggcctcgcggccctccgagatgagctttcgcacggaaggattggccaacatcacctcgacggccggaacgcgcgggatgccttctcggatgcagggcaggagggcttgactgacgattgctcggagggccagcgccagcgtctgtcgcaccagttcacgctcttcctgggggaaaaggtccagcaagcggtggacagcctgtgaggcgttggacgagtgcatggtccccatgacgaggtgtcccgtctctgcggcgcgcatcccggctgtgacagtccgggcgtcacgcatttcgccgacaaacacaacatccgggtcctgtcgcatgaggtaggtcagcgcctcgacgaagtccggcacatcgatcccgatttctcgttgcgagacgatggctttgttgtcgttataaaggtactcgatcggatcttctacggtcacgatgtgacaagcacgcgtttgcgtgatatggtccagcatcgcggcgatggttgtggtcttgccggagccggtggcgccgaccaccagaaccagtccctgatgcgccgcggccacctgctccaatacggggggcaggtgcaggctctcgaacgagggcacatgggcgctgacgcgccgggccaccaggctgatcaggcctcgctggcgaaagacattgatccggaaccggtgctccttgccaatctcatgcgcgaaatcgagtgtcccgttcttgatgaagaagtccttctgagtcggactcaggatctcgaacactaactcttccatgcgctcaggggtgagcacttcgccggttgtgttcttcagactgccctgcagacgcagcttgggcggttgtccgaccttgagatggatgtcgttggcctcggtcttgatggccactttgaagtaccggttcagctgaggctcgtggtccagtgccttgtgggcatccaggggttgatctggtgtcatgatcttgctaactccataaacgaaaagaccggccaccgtgtgccggttgccctagcacaagccaacaacccgccgaccgtctgcgagaagatttgcagcgacaaacctttatgactacgtattataagacacagttccacctgttgtcaagcctgatactttcaggattcgcccgattctccgcctctcttaacaggattgtttttggtttagttgccgtgtcctcctgatccgtgcatgtggctcctggtgggcccgataatctacttcctggaggggcctgccggcgtgctggggcttttgtctttgattgttgcctggagtcacgctatagtcggcctgcgcggcctccggatgtccgggaggctgtgcgattgggatgcttgtgggaattggagccaagaagggtctatggcgcgtggcttgttttacaatctcggtagaaaagtgggccccaaggtccgcaaggccaggtgggtctgggagtccgtggcgggcaccgagaccgacaccattcgactggagcacggcgttggtatggacctggcccaggaggcccggaggcagcttcaaggggaccctgagacggcgcaggtgctggaggaggtcggtggccggctggttggtcgggtggcgaacaagctgcgttccttcgagttcgaggccttccagggcggtgaaccgaacgccttcgcgctgccgggcggcttcgttttcgtcagtcgtcccattgtagaactctgccagtgggacaaggacgaggtggccttcatcctggcccatgagatgggccatgtcatcaagggccatgccattgatcgcatcgtcaccaattcggccgtctctatcgcctcgcgggcgaccccggtgcgcggcgttctcggcccctggctgcagcgggtgggggtccagttcctggagaccgcctattcgcgggatcgagagctagaggcggatcgactcggcgttcgcctggccgcggcggccggctacgatccgaaggcctctctgaagttgttcgagagcctggcggcgataaaggcctcccccgatccacttgacctcggggcgtatttctccagccatccgaccttcgacgtgcgcatggagagcattcgccagtatatgcggcaatggtaactcagataggaggcgggccggttccgccggccagggcgacggccagggccatgtagattgtgacgctgatggagtcgttggcggttgtgaccagcggacctgaactgatcgccggatcgataccgatgccgcggaacaggaaggggagcatcaatcccagcgtggtcgccaccatgatagctgagaacatcgcggtgccgaaggcgaacaccaggcgggcgggttctatggccttctccgggattctcgtatggatcagaatggtgcaggccagagcccccatcaggccgcaactgagggctaccagaaacgcgatgcggacttcccgagtcaacaccgtgctgaatttcaatgccgccaggtgaccggttgcgaggccggagaccacgatggcggaggtctgaagcccggcattgccgctaatggctgcgatcatgggcacgaacgaggcggcggcgaggaacacgacctcgttgtatgtcttgaagaaggtcatcaccagtgccgtcacggctgtcccgatcaggcagggcagaagccaggtcatgcgaatacgggcggcgtgaaaggccgagaagctctccaactcgtccgggtccgtaccggccatcgtgtagaggtcctcggcggcttcctcctcggcgacctcgatcacgcggtcggccgtgatccggccggcgagtcgatggtccttatccaggacgggggccacgattagatcgttcttactaaagatattacggacctcttcctggtccatgtcggtctgcacgtagatggtgtccgggtcgatcaactcgccgaggcgcgtctgctcgggccgggtcagcaggaaacgcagacggacgtcgccgacgaatttcccatcctgatcgattacatagacggaatagaagtcctcatcgatctcagcggcgcgaatcttgctgaccgcctcggcgacggtggcgtcctgggccacgctgatgaccagcgggtccatgatcccgccggccgagtcctccgaatagcgcatcagcttgtggatctggagacggtccgtttgaggcagactgcctaatacctggtcggcgaactcgtcgggcatctccgccaagaggtcggccgcgtcgtcgtaatccaactcggagacgatcttcgggatctcgtgatccttgagcaactcgaaaagacgctcgcgcgtggcttcattgaccttttcgaggacttcggccgccaccggcgtctccagcatgtcgaagatctggcgtcgccggtcattgtccaccaactcgaccacttcggcgatgtcactggtccgctggtcatcgagaagggcgcggaggctcgccgcgtcctcggattcgagcaagagtccaatctcttccagtagttgtttctgctcttcggccatctgcgagcgcacaccgtttcccgttactcgtgctatcgaacgtggcaccaccatctgtcagtcgtgacaaaatcacccacctggcggacaagaatagtcgaatcagttatgtcgggcaactgttttgtcatgcgaccggtcctgacagatggggtcggccttggccaggccgggagaaggccctcgatttccggccatgcatttgctatactggcccataagtggtttatctgtgaggagagatgatggtcggcccagggccgataagaaacacgtcgaaccatcacgcttgctcctccaccggtctttctgagggttgtgtgaagaccgccgtagctgccgccggaactctgacgacacaagggacgcgctatgccaagatcgatcgttgcctactttgtttatgggatcatggctctcgccatggctggttcagcccggggggcttgtcctgtgggagatctgacgggggattgccgggtggacccgctggatctgtcggctctcttcgaccaatggctgctggaggttgacaccggggcggacctgaacgccaatggtcgggtagagctgggggattttagcagtctggcccaggcgtggcgcgccgcgccgattcccttggtgatcaacgaggtcatggcttcgaacagcaccttcgtgcaggatttgcagggcggtttcgacgactggatcgagattcacaatgccggtcggacgacgatcgacttggcggggatgtacctgacggatgatcccagtgacccaacccaatggcagttcccgaccgacaatcgcactcagacggcgattggtcccaaagggtacctggtcgtttgggccgatgaggataacaccggcgtcatgctgcatgcgcacttcaggctggacgccgatggagatgaggtgcacctgttcgataccgacggcgtaacgctcatcgatagcctggtctttggggaacagacctccaatatgtcctacggacgttaccccgacgccggcaactcccagcggttctttggctttcccaccctggggcgacccaacaacgaagggtatctgggggaggtcggtcccctgcgattcagtcatgaacgtggcttctatgacgatccgttcgatctgacgatcacttgcccgacggagggtgtcgagattatctacaccaccactggcaaggcgcctgatgacgaaagcggtcgtttccgagcgggtctgacctactccgacccccttcggatctctcggacgaccgccttgcgggccatggtcgtcaagcctgggtggaagccctcggagatcgcgacccacacgtacatcgtcaatgcttcggagagtattcgatcgctgcctgtcatctcactggtcggcgacaaggggcaaaccttctatgagcccgaaggggtcatggcgatcgtcggcggcacctacagcaacggcgtctggacctcgtcgggagcgggcagttataacaacgtactgaaccggggcctggagcgtcccgtttcgtgcgagtggatggaccccgagggggacgacatcttccaggtcgattgcggtctccgcgtgcacgggagcggttggatgcggccgcggtacattcggcagaatggtcagtggaccgggaacggaaaattcagtttgcggctctattttcgaaaccaatacggtccctcgcgcttgaccgtccctctctttgacgagtccgacgccgagcagttcaagagcatagtccttcgcggcgggcataacgatcggacgaatcctttcattaaggacgagcttctgcggcgtctgcacaaggacatgggccagcgggccagcatggggaacttcgccacactctttgttaacggggagtacaaaggctactacaaccccgccgagcacatcaaggaggaggcctgccaggaatggttcgatagcgaccagccttgggacatcatgacgatgaacggcattcgggacggcaaccaggagtcctggaacgagatgctcaattcggcctgctccaacaatctggccgtcgatgcgtcttatcgcgaggtgatgaacaaactggatatcgtctcgttcatcgattatctcattattcgcctctggcccaacgactgggattggccgcagaataactgggccgcggcggccgaacgatccgcgaccggtcggtggaagttctttgcctgggatgccgaggggaccttcgtgtcgagccagttgcatgtcgaccgattcggagaactcaacagccagaacaatgccaacgcgcaactctaccgggccctcaaggtcaacaagaacttccggcaactcttcgccgaccggctgtacaagcatttctacaatggcggcgccttgagcccgggcaatatcgaggcgcgattctccgacctccgcgatcagttgcgcggcgtcatcccgaatatgaacacgtatattatcgatggatggacgccgaatcgcgcccaggtcttcattgacgcctgtcttcgagaaggcatgtacaccttcgccggcccgaccttcgccgtcaacggttccagtaagcagggtggttacgccattgccggtgacctgttgcagatgattccccctcgacagggcgcgccgatctactacacgctggacggcaccgatccgagtggctctcagatgtcgaccgagacgcccatcgtgacacttgtggatcgcgctgcggccaaacgcgtcctcgtgccgaccgggccgaacgtgggggactggaccaacattcggggtttcaatgattcgaactggattctcgtcgaaggctatccgggcggtgtcggatacgaacacagttctggttatgaggactatctcggcgtcgatctcgagcgtctcatgtacaacaccaacggttcctgtctcattcggataccgttctctttctccggcgaccggggcgaactgggacagatgaccctggagatgcaatacgatgatgggtttgtcgcgtatctcaacggggccgagatcgcccggcgcagtttccagggcgaacctacatggaattcgactgcgacggcctcacatggagacaccgacgcggtggtcttcgaggccatcgatgtttccagctccctcctatcgttgcgaaacggcaccaatatgctcgctatccaggggctgaacagttccgtcaccagttcggatctcctgatcacccccaagctgaccgttgctcgcgatgttgtcgcagaggtgcctgacggggccatgctgtacgccgcgccgatcccgctgacgcaaagcgtgcgcgtcaaagcgcgtgttcgcaatggcaacatttggagcgcgctgaatgaggcgtcttttgccgtcgggccggtggccgaaagccttcgcatcagtgagattatgtaccatccggtggatatgggcggcccggacgatccgaacaccgagtatattgaactgatcaatgtggggcctgtgacgatcaacctgaatctcgtcagcttcaccgatggcgtcgattttactttgcccgagattgacttggcgccgcaagaccacgtgttggtcgttagagacctcgccgctttcgaggggcgatacggctcggaacttcctgttgtcggggtctatcaaggcagcctcagcaatgccggcgagcgcattgtgttgcaggatgcggtcggcgccgtgatccaggatctgcgatacagcgatgattggtacgacatcaccgacggcgccggtttctccctgacggtgcggcgtccagtcggcggtgtcccgatcgcccggaaccagaagagcgattggcgacccagcgccgccgcagggggttcgcccggtttcgacgacgccgatcagacgccgcctttaggggcggttgtcgtcaacgaggtgctcgccaattcggccggtggtgttcccgattggctggagctccacaacacgaccgatcaggcgataagcatcggtggctggttcctcagtgacgatgacgacgccctgaccaagtacgagattatggaaggcgccgtcatggctccctatggttatctggttctcagtgaggatcagcatttcggcaatgacggcgaccccggatgtcacgaggcgttcggcctgagtcgcgacggcgagaccgtctatttgcattcgggctttgaaggcgccctggccggctataacgagcaggtgacgttcggtccttccgatccgagtgtcacgctggggcggcatcggaccagcaccggcgctatcgatttcgttcccctcagcgcgcccacgccgggtcaggagaatgccgatccacaggtcggaccgatcgttatcagcgagatcatgtaccatccggccgggtccgaggacgccgagtacgtcgaattggtcaacgtgaccgatgcagatgtgacgctctatgatttcactcaggcggcgccctggcgtttcaccgacgatcccgacaatcccagcatcgaattgcttttgccgaccgacccgcccgtgacgttggcgccgtaccgttacctcgtgctggtcaaggaccgggcgcttttcgagagcgtttacaccgtgggtgcaacggcgcagattctcgaatggccggccgggagcctggacaacgccggtgaagtcctgcaactcagcacgccgggccgtctggatgacgaaggacagcgtccctgggtcgtcatggatcgtgtggcctacagtgacggtgcgcatccggaaaatttacctggcggcgtcgatccatggcccgtcggagccgatggccgggggctgtcgctgacacggaccgttcccgcccattatggcaacgaccccaacaactggcacaacgccgtcgattcacccggcgccagtcgccgtcgtcccggctagaccttgatgaaggtcttcttgcggtacatatagaagaggatcagccatatcacggcgacgctggcgacggcccggacgaagctgtgccaatcccccgtccattggctcagtccctggaccaggatgtcgcccaggtgccggaagtcgaatacgtgcgtcatcatgtagatggcaatggcgttggtcccgatgacgacgaaggggaaggccagaaagcgaagccggagcacgtcgatgaccaggtagaaaacccccagcagcagaaggctccagccaccggcgtagagcaccatcgaactggtccagaggtgcttgataatcgggaagatccgtccccaccagtgtcccaagtagatgcatgcgacgcccgaggccaggaggaagagcacttttctgactttccccaggtcggatcggagcaattggcctgcgaacgcgcccatcattacggtcgtcgcgaaggtcatgccgctgagaatccacgtatacgtcgtgccatcctggtagggacccaggatcagtttgtcaagatagatggcgagattgccttgctcggtgagttgcccggcgccgtgccccggtacggggaccagcatgagcaacgcccagtacagcagcaggagcgcgaccgtggcgattgcctgccaatgcgctttcaggttcaacaggaggaccgaggcgatcagatagccggcggcgatggcctggagggtgttgctgtagagacggagcgtcgccaagtcgtactcgagcaagcggccctgggcgatcatgcccagaacccacagaatgaccactcgaagcatgatgtgcaggtagattctggccttgctctgaccctgaccgagccgcttggcgaaggaaaatggcattgccgcacccaccacgaagagaaacagcggcatgatcagatcccaggcgacgaatccctcccagggcatgtgccgggtgtggggcatgatgacctggtcaaaccatgggctgttgagacccttggccagaccgccaagtatcccgcctcccccgatgatccatagcatgtcgaagcctcgcagggcgtcgagcgataccaggcgtccttccttcgcaacggcgggtttgtccacaggtatatccattcgagaatctccttcttcccttgtatcacaaggccactcctgcaccggcagggggttgacacgcatgccccggccgcttgtcgggggggcatgcgcaacgttgcggccaaaataacgccgcgcagccgcaaattcaatcctcattgtgcggcacacttttctggggggatatgcaagatatgtgtaaccgatgtgccttgagcattcactagacacttgagttggtgtgcagaggcctatctcgccggcgaaaatccgtcaaatctggatttggccacaataacgcggcaatttcctgcgtctatacctgtctgatggctttggcttttatcgggtctgatgcgctgtgaccgtgtcgtcaaggcgttttctcattgactttagtggtgtaaatagagaaactacattatttgggcatgcttatgaagcaacgcaaccatggagaagtggaccggtggaggctcaggtcgggagggacgcccctggcgatgctgctcttgctggcgggcgctgtcctggtcggctgtcggtctccccagcaacatcgcgagaaggctgatgaggtcgcttcggagattatcgcggccaagcagcaggaggcgctgggcaagaccgagccgttcagcatcgaacgaccgagcgatctgcttcggcgtcgtctgctggtcgagcagggtctgctttttgccgatgaggcgtcgctgggaaccgaccaactcgaacgcatcccacactggcccgaggacaactatccgctttcagtgacctcgcccgatgcggcgatcgcgattgagccgaacaagccgctcaagctcaccttggacgatgtgctgcagatcggggcgcggaacagcttcgactatcagtcccgcaaggagagcgtctttcggaccgcgcttaacctcgatctgacccgcaacgacttccgcaacatcttccgagccgacggggacagcacgctgaccgccgatacgaggggcgacgagaccgttacgacggtggactccggcgccgtggcgggcgtgacccggaccctcaagaacggcatggacttgagtaccgcggtggcgatcgatctggcgaacctcctgacgcaaggcggcgcctcctcgctggggctcagcgccgatgcgagtttctccgttcccttgctcagaggagcgggaaggcatattgtgaccgaatccctgacgcaggccgagcgcagcgtgatctacgaaatatgggatttcgagcgtttcaaacgttcgttcgccgtcgacgtggcgcgacgctacttcgatgtcctgcgccagatggatgcggtcgccaacgcccgcgacaactatcgcagcgccattacctcggcccggtggtcgcaacgacgggccgatgccgggcgcatccgcgagatcgaagtggaccaggctgtgcaacgtgagctgggggcccgcaacaattggatttccgcgcaggagcgactgaaagggaatctcgattccttcaagagtgcaatcggcctgcctcccgacgcactgatcgaactggacccgaacgatctcgtgcaactgcgaacgctctcggaagaaacgctcgaaacgatgcggaaggcctctcagcgagagacctccgaaacggctcccgcggccgatgcaccggtcgaactggtgccggccagctacgaggacgccgggacgctggaactggacccgatggtcgccgtgcaactggcgctggacaaccgactcgatttgcaggcggcgatcagcggagtttacgacgcccaacggcaggtcgtggttagggccgatgccctgagggccggcttgaacctgggcggttcggcagcgctggcagacaatgacgatgatggcagtttgagcttcgatggggcgcggtatagagccttgctctcgctggatctgcccatcgaaaggacggccgaacgcaacgcctatcgcaacagcctgatcaatctggagcgggccacgcgggacgttcagtcgctggaggatgacgtcaaactggccatccgcgatcagttgcgcacgcttctggagtcgcgtgagagtctgaagattcaggcccaatcggtggtggtagccgaaaaacgcgtacgaagcagtacgctttttctcgaggccggccggatagagattcgagatttgctggacgcccaggattcactgctctcagctcagaactctctgacttcagccgtcgtaagctatcgtattgcggagttggaactgcagcgcgatctggggcttctcgaagtaaacgaaaagggattgtggcgggaattctcgcccgaggacaacgatcatgacagctaaaaacggcaacaggaccagtggtggcggcaaatccttcaaggtggctggcgccctcgtgattattgtggcaatcggcctggcggtcgtttggctcaaggtggtccgagggggtgagtcggcttctatggaaatgtccaccttcgcagccgaacgcggacctctgaccatcagcgtgctcgagtcgggaacgatcaaatcccgcgagcaggagatcatcaagaacgaggtcgaggggcgtacgacgatcatttccctggttgccgagggaaagcgggtcaaggagggagatctgctggttgagctagacgccagcacgatggacgacgacaagatcgagcaagagattcggacgatgaacgccgaagcctcctatatcaacgccaaagagaccttggagatcaccaagagccagacgatcagcgatgtgaacgtggcggaactgaccctggagttcgccatccaggatctggagaagtacaagagcgggcagttccccaacgacgagacggccgctgagaaccagatcgagattgctcgtgaacgactcacccgcgacgaagagacgctgaaatggtcgaagcggctcttcgaagagaagtacatctcccagacggaactccaggccgacacgttgaccgtcagccaggccaagaacaatctgcagttggccgagaacgattatcgactgctgaacgagtatacctacaatcgccagatcaagcagttgggtagtgacgtcgatcaggccaagatggccctggaacgcacccaggcgaaggcccgggccgacgtggttcagtcagaagcggatttcaaagccaaggagcaggaattcaatcgtcagcagaccaggctcgccaagctgctggatcagatcggcaaagcgaaggtctacgccccggccgatgggatggtgatctacgcgacgaccgccaaacgcgggggctggcgtgataaccggcagccgttggatgagggcgtcgaagtctacgagcgtcaggagttgatctatctgccgacggccgattcggcgatggcggaggtggatatccatgaagcgagtctggagaaggtcaaagttggccttcccgccatcattacggtcgatgccttgcctggccaacggtttatgggcacggtcggtcgcatcgctccgctgccggattcggcgagcatgtggatgaatccggatctgaaagtctacaactcagatgtgtatctggaggatgaatcggaggaattgcgcaccggcatgagctgcaaggtcaatatcgttgtcgcgcagtaccaggacgcggtctacgtgcccgtgcaggcggtgattcgggtggccggtcagcccaccgtctacgttgtcaaggaggatgggacgatcgaggagcgaacggtggagatcggtctcgacgacaacaagatggtcgtgatcgagagtggtttggacgagggggagatcgtgtggctgacgcctccgctgaagtccgccagcgtggagtccggctcggaaggcatgctgggtggggtcagggacgccaatggtgtctccgatggcatcacgcagcagatcagtgacaagctcaaagccgccaatgaggccaagcccgaagcgcctcaggttggcgaggaggggcaggagggctctaaggggccggcctcgaagcagatggaagatatgcgcaagggtatgcagaacatgacggccgagcagcgcaaagaggtcatgaagcgcatacagaatatgacgccggaacagaaggcgcagttgcagaaggcgatgcaaggtgcggccgcgggcggccagggaggtcgcggcaggccccaggggcagggcggacaacccggcggcaggccggccggacgccccagaccgccgcagggcggcgccagagggggtcagtagatggctgaccaagccccttccagcgatcattccgatattgtcaagctcgtcgaggcgcgcaagacctaccagatggggaccgaggaagtccgggctctggccggtgtggacatcgccttcgaaaagggcagcttctgggcgatcatgggaccgagtggatcgggtaagagcaccatgatgaacgtcctggggtgcctggatcgcctgacctccggctcctattacctcgataatcaagatgtcagccagatggatgacgattcgctcagcgaactgcggctcaaatatctgggattcatcttccagagtttcaatctgattccccagttgtccgttcagcggaacatcgagctacccctctactacctgggttgggatgccattcgcagcgctgagcgagcgaaggaactggccgaggaggtcggactgggcgatcgcctgaaccatcgaccgacggagctttccggcggacagatgcagcgcgtggctgtggcccgggcgctggccaacgatccccacatcatttttgccgatgagcctacaggcaatctcgactccgtcacgggcgtccagatcatgcagttgttgagcaaattgaacgagcagggcaagaccgtcgtcatggtgacgcatgagcccgatatcgcgacctacgccgagaatcggttgcacatgatcgatggcgtgatcgatagaatagaaacaggtgcgcatgagacagacgaagatcgccaggaatatctggctcggcattgagaatctgctgctccacaaactgcgttcgttcttgaccatgctgggtgtggtctttggcgtgggcagtgtggtggccatgctctcggtcggtgagggcgccagccaggaggccctggctaatatccgcaagctgggcagcgacaacatcattattacatcggtcaagtcggtcgaggatgagcagtccagcacgcagcattcgcacatgagtatctacggcctgacctatgacgaccaggaccggattcgcgatagttttgcacgcattcgcaagacggcgccggtcaagctgatgcgcaaggagacccggctgcgcgagcgcgccatggagctgcgcgtggtggggacgacgcccgaatggttcgcgctggtgccgcgtgatattatcgccgggcgcgtgatcgtctcggccgatcagcgcaaacaggccccggtggcggtgctgaccgagtttggggcccgcaagatcctggccaccgagagcacgatcggtcagaccgttcgcatcggcggggatgagtttgagatcatcggcatcgtccagagtgagagcggccaggcgggaaacattcagatccctgacgaagacgtggacatctatatccctctggaagtcgcccgcgactacttcggtgatatgtttaccaagcggacctccggttcgttcgagcgggagaaagtgcagttgcaccagatcattgtccaggccgatggtcccgacgctgtggagtccaccgccgcgggtatcgagcggatgttggagcgctttcacaagaagaaggactacacgatgagcgtccctctggcgctgctcaagcaggccgaggcgaccaagcgaacgttcaatatcgtcctcggttcgatcgccggaatcagtttgcttgtcggtggcatcggcatcatgaacatcatgttggcctcggtgaccgagcgtacccgggagatcggtatccgccgggcgatcggcgccaagcgtcgccagatcatctatcagttcctgattgagacggtcgtgctctcgatgtttggcgggttgatcggtctgggtgtgggcaccttgatacctttcctgattacctacttctccggcatggtcacggtcgtgaccctggacggcatccttctgcccctgttcatcagcatggcaattgggatcctgttcggtctgtatccggccatgaacgcggcgcgggtcgacccgatcattgccctgcggcacgagtaaggtgtttggtgggccgtctgccgaaacggacggacctatgctgagctaactggttgcgggaggatgtgcgcatgagacagaccaagatcgcacgaaacatctggctcggcattgagaacctgttgctccacaagctgcgctcgttcctgacgatgctcggtgtcgtgttcggggtcggcagtgtggtggcgatgctctcggtgggcgaaggcgccagcaaagaagccatggcgcagatccgcaagctgggcagcaacaatatcatcgtctcctcagtcaagccggccgaagatgaagcggccaatactcagcggtcgatgatgagcatcttcggactgacctacgacgattacgagcgggtcgccgacagttttgggacaattcgtcaggtcactccggtaaagttgacgcgtaaggaaacgcgcctccgcgagcgatcgatggagctgcgcgtggtcgggacaaccccggaatggttcaaactggtgccccgtgagattctagccggtcgcgtgatcatgccgggcgatcagaccaaactggcgccggtagtcgtgctgaccgaattcggcgcgcgcaagatcctggccaccgaaagcgtcatcgggcagaccgttcgcattgggggcgatgagttcgagattgtgggcattgtcaagagtgagagcggagaggccggcagtatccagatccccgacctgcaggtcgatgcctatgttcccattgaagtcgcccgtcggtactttggtgatatattctccaagatgacctccggctcgtttcagcgggagaaggtggaattgcaccagatcatcgtccaggtcgacaaggccgaccacgtcgaagcgacggcggccggcattgagcggatgctggagcggtttcacaagaaaaaagactacaccatgagcgtccctctggctctgctcaaacaggccgaggcgaccaaacgaacgttcaacatcgttctcggttcaatcgcgggaatcagcctgctcgttggggggatcgggatcatgaacatcatgctggcctcggtgaccgaacgcacccgggagatcggcatccgtcgagcgatcggcgccaagcgccgtcagatcatctaccagtttctcattgaaacggttgtgctctcgaccatcggcggattgatcggcctgggcgtgggcaccctgatcccgctcctgatcacctacttctcggggatggcgaccgtgatgactctgaacgggattctgttgcccctgttcatcagtatgggcattgggattctcttcggtctctacccggccattaacgccgccaaggtcgatcccattgtcgccctgcgccacgaataggagcgccggcgctgatctgaggaatgcgcgacagaacgcgtaaccttctctgggcagggtcccactaccctgaggacaagacataagtctgaaagaagtcgtcaatagattgtaaccggcttccgtgcgggctcactgtatgcgggaggcggttccgtgggggatcgccttcgtgttggagtaacggtctgatgtttctcccaaaggagacttgcgtcaggaccggcgtggtcgaacaaggatgctgaaaggagtgacagatggcaagaagggcgatggtcggtctggttacggtggtgatgctaatggttgtgggatcgctcatggcccagccaccgtcgctagcgcggcccgtcccctcaacggttgggcgtgtgcctgtcgccgatgtcctccgacgactgggggcgaagcttgagcagggagcggcgaccaaggagtccgacgattacgcaagtcatttcaaccggctggacataaaccgagatgggaggcacacgagggcagaatacgtcgagaagggcagctacatgacccctcaggcgcgggcgggcatttttcgagccgccgatggcaatgccgacggaattgtcaccaaagctgagtatgttttgaaccggatcattactgatgaagccaaagcgatcgttcaggggatggacgatgataaggacggtttggtggagcgagcggagttcgtcgagcatgcggcgaaactgctttccgatcctaagttagccaggcaggtttacgcggcactggatacgaacgctgacggcgggattcccatgcccgagtatctgcgcgtgtgggggcagtgggcgcgggttggacgaaagtcggctgaacagcgcctcgcggtgcgacaggtggaattcacggattttgcgagccgacccggtcaacagccggatcgtccacgcggcccgcgggggatgggacagttcatggagagcaaacctgccctggccaagacggatttcgagaagaaggtcctggcggtgctggatgatatggacagaaaccagcggcgcggcaatatgaacgtgcccatccaggacggtcgactcctccgacttctggccgagacaatcggcgccaagcatatcgttgagttcggcacctcgaacggctattcggggatatggcaatgcctggccctcaagactaccgggggcaggctcactacctttgagatcgatgctcgacgcgccgctatggcgcgggagaactttacgaaggccggggtgggcgatcttgtcacgctcatcgagggggacgcgcacgagaaggtggtcgaggtcaaaggtcctgtcgatatggtctttctggatgcggacaaggaaggctacgtcgactacctgaacaagctgttgcccaaggttcgtccgggcggtttgataatcgcccacaacatgaacgcgcgtcaggccgatcctcgctttgttgaggtgatcaccacgaacccggacctggagacgatctttctcaacggcgtcggtctgacgctcaagaagcgtagtctgccctagagagacgatgtcgaacatgcgtgacatggtcgaccagcgatcttccttcacgagggtggtgccgatgtgatggcgccggccaggccggctgccttggaatagccgcatcggcacccctttttttcttcacggggagtgctagggatgaataggcaggcagtcgcagtagttgtcacgttgctgttgtgtgctcaagcggtttcggcctcggattggcccggtttccgaggacccggcgctaccggtatcagcgacgagactcatcttccgattgcgtggagcgaaacagagaatctgaagtggaagcgctcgcttcctggttccggttcgtccagtccgattgtcagtgggaagcgtctcttcgtaacctgctactcgggatacggccttgacgatcgcagccctggcaaaccagaagaactgaagcggcacctgctctgcctcagcgcggttgatggcgcggtcctgtggcataaaacagtggacgcggctctccccgaggatccctatcgcggttacatcagcgagcatggctacgccagcagcacgccggtcaccgatggacagcacgtgtacgttttcttcgggaaatcgggtgttctggccttcgatttcgagggcaaccagctctggcgcagagccctcgggaccgagtccagcaatcggcggtggggttcggcctccagtccgattctctatgagaaccttctcatcgttaacgcctcggaagagagccggaccctgatggcgatgaacaaactgacgggcgatgaggtgtggaaggtcgaagcggacaagaccgagttgtcgttcgcgacgcctgtgatcgtcaaactcgccgatggccgggaggagttggtcctggctgttccctcggagatctgggcgttcgagcctatgactggaacgctgaattggtatgcacggacgacgctgggtggaaacatctctccgactccggcggtggccgatgggatgctctacatctttggcggtttcccttccaccgaggcggtcgctctccgcgccggcggcaaggacgacgtcaccgaaacccacatcgcctggaccagtcgcgacgcgtcgtatgtcccgtccccactggtgcacgatagacacctgtactgggtcagcgacaagggacgcgctttttgcgccgaggcgaagacaggtaagatcctttttgaggagaagctgccggtcaaggggggcaagcccttctatgcctcggttgtcctggccgagagccggctgtacgccgtcagtcgcacgggtggtacgttcgttctggccgccaagccgaagttcgagcaactcgcgcacaatcgcttcgtatcggacgacagcgatttcaacgccagtcccgccatcagcaatggcagaatcttcctccgctcaaaccgtttcttgtactgcattgccacgccctgacaccatcaccctcgacatgtccatccatgcaggctatgccctctctacaaggggcatggcccgatttctcttacggattcacgactccccacgattcggcgagagaaccacggcaaaatctgcgcgacgaagaattggagtaaccgatccggtcagaggcgtcacaagtatggtgaaatgattactggataatgcggaggtgtgccatgagaatcagcgtatggtttgtgttgtcgaccgtgttccttttcgtatccccgagcttcgctcaagatgaagacttctacgatgagaccgtgctgaggaccctccatctggagttcgccgaacccgactggtggcgccagttggaggccaactatgacgcaaaggagaacattctcgccactttgactgtcgacgaggtcgtttgcgagagtgtcggcgtccgatttcgagggaatacgtcataccggatggccggagactcacaaaagaagtccttcaatatcgagatcgactatgccgttgaggatcagcgcctcatgggctacaagacgctcaatctgatcaactgctggggggacgccaccttcatgcgcgaggtgctgtactcgaacacggctcgcaggcaggtccccagcgccaaggccaacttcgtgcgtctcgagatcaacggcgagaactggggcgtttacgccaacgtccagcagctcaatgccgagttcattgaggactggttcgcgagtaacgaggggacacgctggcgcgcccaaggcacgatgggtggcggcgctcccggcccggacggaggaggccctcggcccgttcctcgggcggtcgatgagagtgatgatggattgcctctgtccgaagagggtggcgtcaccagtggcgtggcggcgctgacctggcagggcggcgattcagccacctacgaagcggcctacgagctcaagaataccaatcaggaagagccctgggcgagtctcattcacacgtgcgatgtcttgaacaatacgccgctggcgcaactgcccgacgcactagattctgtgctcgatgtggaccgagccctgtgggtttgcgcgttcgagatcatctttcaggatgacgacggctatgtcaacaagcggggcagtgactatggtctctactacgagcctgagaccggtcgattgcacctgatgcagtacgatggcaatgagtgcatgtctaatgagcggtggtccttgttctaccgggacgacgacccggtggtgcctttgatgcaccgcttgctggccatcgaccagtaccgacagcgctacctggcgcacgcccgcaccattctcgagtccttcctgacggaggaggcccttttcgcgaagatcgacgcctatcgcacgctcatagaggatgaagtgaagctcgacgacaagaagcggaattccagccaggccttcgaaagtggtgttgagggcttgaaggatttcgtgcagaggcggcgcgactatctgctgaccaaccgggcactcactcgatcggtccccgagatcgtaggcgtcgagcaggaggctgtcctgaatgatgacggcgagacgcttacggtgacggcgaccatcggcgactctgttgctgtttcagaggtgcgattgttcgtggcgtccggcccgtttgcccttttcgagtcggtccctatggtggatgacggcctaaacggtgacggacaagcttccgatggtgtttggggtgcgagtctctctggttatctatcgggttcgcaactgcgttactacgtacaggcgacctccgatgacggcaacggcaccgtgacattcaacccccccccgcgccgagcatgaggtctacacgcacgtcatgacctattccgatgccgcgttttcttcgatcgtcttcaacgaactcatggcgcggaacgatacgacgctggccgatccgcagggtgagtatgacgactggattgagttgaagaacatcggcgaccagaccgttgacctggccgggatgtacctcagcgacaacccggacaatccgctcaagtggcaattcccggaagggactctggtcgagccgggcgggtatctgctcgtctgggcggatgaggacgggagcgatgagccgggcctgcacgccaatttccgattggccggcgatggcgaaacagtctggttgttcgatacgatcgaacagggtcatgctctcctggattccgtgacatttgaggatctggatgaggatcaatgcagcgggcgttcccccgacggtgaggggcccatgcaggtgctgtctgtgccttcgcctctaggtcccaacccgatgccggtagcagcgggagacagtccgtagggccatcgacacccaactgcggcttggcgcattggatacgtcagaccgcagtattgcggattggggcggcgcgcgatatgatcctggtgtgacattcgtttggattgccaaccgggatcgttgaaggggtatgactgatgatgcgaatcaaggcgatcatcttaataggtttctgctgtgccgcggcgtcctgggccggcgaagtagcgaaccccgaccccaatcgattcgccaaggatatcaagactttcatggcgtgggacagcaagaatgctgtgcccgtcgattcgattctcttcgtcggcagttccagcattcgcatgtggaagacacgggagtcttttccggacctgcccgtgatcaatcgaggtttcggcggttcgcacatctccgacgtgatccatttttccgagcatatcgttctgccttatgcaccgaaactcatcgttttttacgccggcgacaacgacgtggcgggccgcaaatccgccagtcgcgtcctgtgcgactatcgtcgttttgtcgaattggtccacaccaaactgcctgacacctcgatcatcttcatcccgatcaaacccagtggaagtcgctggtcgctttgggcccagatgaagaaggccaacgatctcattgaggcattctcggggaaggactcacgcctgttttttgcggacctggcgacgccacttctcaacgctgagggcaaacccgacgacggtttcttcctgggcgacagacttcatctcaatgaccgggggtaccaagcctggaaccgcgcactgcggcctgcgatcgagaaggccctggacgcgcatgctgcacgcaaatccggacgttagacatctaccgagagccctgcagcccgccgctgaccgggcaattctctggacaaaggaaggcggatttgttacaatacaggtttgggtgtgagtgatgcttcttgtcttgtcctcgttgggatggggagccgcagttgaggtcgttcaaaacgccggaaacgccactcagggggcaaagaatcggcttcaaacgaggaaaatcggggaaaaagcgttacaaactgcatttcggatggcactaaccagagactgttaaacatccgatttccaggtaattttttcggaggaggttacgcatgtactgccgaccccatcatgtgtctgtactgatcgcactaatgtgtctatctgtaatcccggccaccgtgttcggtaggacgttagaggtggaaagcaccggcaaggtcggctacgccagtattcaggcggcagtggatgcggcggtcgacggcgacaccattgtcattcatccgggcacctatacaggctacggcaactgtgacatccgtctgcagcgtaaggccatcgatattcgcagcgccgacccggaagaccccagcgttgtcgagacgacgatcatcgattgccaggggaccgctggtgtatcccatcggggtttctacgtgactgattttgccggagagatttccggcctgaccattacgaacggactggcttccgtcggcggcgccatttactgtgagaacactacgctcgtgctgtcgttctgtcggatagtggacaacgctacgttgcccggtggggtcaaggtcggggtcgacggtggctccggcggcggtctttacggcgttgcttcggctatcgagatcatggactgtttgattagcggcaacgctaccggggccggggcagagtcccgagtgagcgccgggggtgacggtggtgacggcgccggcctgtacgcgcgggattcggtcgtatacgtatcggactccacgatggttgacaatatcaccggtgctgggggcagttccgatatttttgcgggaagcggtggcaccggcggcgccgttcgctgtgactcgctggtcttgacccatacgaccatcgccaacaacatcaccggcgccgggggcagcggtcccatcggaggccatggcggtctgggggcgggtctctattgcatgcgggctacgatcgaaaggagtgtcatccagggcaacaccgccggggccggtggagagagtacggacttcgccaagggcgccggcggtcagggtggttccggcggcggcgtgttctgtcaggattcgctggagatcgcggactcgctcgtggccggtaaccggtgtggtcgaggcggcactgccgcaacggccggcgccgacggtcggggtggaggaatctggtgcgcccttggtcgcattgaccattgcaccatcgccgagaatgcttctattcagcaaagggcgggcgtggccggccagggggcgggcgttttttgctcggccgatacggtgatcacaagctccatcctgtggggcaatatcccggaccagttggccggtcagaattgtgacaatgtgacctactgcaatattgaggggaacacctgcccggccagtggcggcgttctctctgacgatccgcttttcgtccagttcggtcaatgggccgattcgactggttccaaggcgaccgttgagcctggcgatcccacggcggtctggacggcgggtgactatcgtctttccgatgggtcaccctgtatcgacgcaggcgatcccgactatcgctacgatccgaatcgaatggacatcgacggtaatccccgcgcctccggagcggccgttgacatgggtgcttacgaggtccagagtctcgcgccggtgtatcgcttctggtcgccgaagacaggcagctacctttacaccgctgtcgaagccgaaaaggacaggatcatcgaagtgtattcggagtcatggaccttcgaaggtgttgcttattacgcctatctccgcgccacccaggcaggtctgatgcctgtctatcggttctggtcggacaagcttggcagtcatttttacaccatagatgaggccgagagagacaagatcctctcccagcaggctcatgcctggacgtatgaaggctcggtcttctacgcctatcccgtgggcggtcagccgcacggggccaaacctgtctatcggttctggtcggacaaggtgggcgcccatttctacacgattgatgaggctgaaaggcagtggttcatagacacgctggccgatgcctggacatacgagggggttgtttggtatgccttcgacgagccggggattggtgagacgccgggcctgccggacgagacgaccctctacgaattcagtgccgggcctgacgccgcctcgtacgggctcgtgctcaaagcctatctggatggccaggaggcccggatcgacaatccgaatctggagttcatccccgccagaagccagatgcagatggctgtcaacgccaaagccatgacggcggagctgacggaattccacatcgaaagtgagttcctgcagtacaccggcacggccaaccagattggcgggacgatcgcgattccgttctccctctacgtaagcgggttcttcgacacgacggcgccgagaggtccctacgccatcgatccgaagacgcagtccttccccacaggcctcgaaaccggcgctgtggctgccggggaggcctacgcggtcgtcggctcgggcgtcgtggagggcgagaagtttgatgtgaacctggtcctgagcccaacagatttcctgatggatggcgtggccacgtttgatggtctcaacggtaccgatcgcctggacgtgaacatggccggtcccttccagtggtatcgccagcagcaggaagatctcttgatggaaaccacgtttaagggacacgtgctgcaactttatgtcacctcggcccgaattcgaaccacgggtctctgggcaggaaagcgtgttcctgacgctgaaaagacagaaaaatagttctttgcgcgcgttgttacgctgcgataattctgggttcttggtagtttttctccgggccgcttgccagaggcaggcggcctggggtataatcagactgccgatgcgggcggggcaggaatgtcaactatatgatgcggacggctgctggtcgggaatgcagacctccgtgtgaggagaacgcagcatcatgacacgcacctctagggctttcactctaatcgaattgttggtggtcattgctattatcgccattctgatggccattctgatgccggcgttgcagcgcgtcaaagatcaggcgcgagaccaggcctgtcggggcaatctcaagagcgtgggcctgggcgtcatgatgtatttgcaggacttcaattttgtgatgcccgacatgcatacgcatacgggcaacacgaatggccatctctggtgggacaccgccggcaatccgttgcgggccggtgacaatcaggcctactggggtatcgcctactatccgtatatcgaggatcgggaggtcttcggctgcccagctttccgcacctttgccgagaccatcgccaaggaaatgctttacggaggcgaccccaagctgatttacacctccgccttcggcgccaacgggtggttgaccaaggagaatacgatccgcattaagcgtcattccgaggtcatcgtcgcgcacgaccacatggaaccgcggattgagaacggcgacagggacatgctcttcgccggtcccggtgggacgaacctgacgcactatcgccagagcgggggccgctccgactggtatcgaggcatcttccggcacaacatccgctccctcaatgatttcgagaccgccggcaccctgaatatcatctggctcgatggtcacgtcacttctctgcgtgagacgaccggcgaagacgtcctgcaacgctggtacgatcccctcaagaagaacttgtagtcggctttctctgagttgcgcgccaacgcgatcaaggcgtcccatcgatatctctattccacttcgggactgatctgattccccgccgtgagactgggttgcgcatttggcaggcgaggctctcgcttacgtggtctctatggctcaagaggaatccgccgcctaaccgaagcattcggtacgtgggggggggcttgatccacgtagcttgttgtggagatcaaccgaccgagttggtgcgtcgtcttaggatcagcaacgttgcgagtatcgctaacacccccaggagaagcccccagatcggggccagcccgagactgctggggatgtacgccatggtcaacgcgatcgctgcgatgagaaggctgtagggcagttgcgtccggacgtgctggacgagatcgcacgaactggcgatcgaactcatgatcgtcgtgtcggagatgggggagcagtggtcgccaaagatggcgccgtcgaggaccgcacccaggctgatcattgtcgtcagtccataggtctgtccgtcgatggcgtaggcgatggggatcgctgtgggcatgaggatcgccatggttccgtagctggttcccgtggcgaacgacgtcagcgaggcgaccaggaagaggatcggtgggaacatgtaaggctggacccggtcggccaggatggtcgccaggaattcgcccgttcctagcgtgtcgcagcagttcttgagcgaccaggccatgatgagaatcacgaacgggatcatcgcccgccggatgcctcgcttgaagcactggacgatcacgggccggctcagcgaaccgcacagttgcgagaagatcagcgccagggtcagcccgaacgaggaggcgcacgccagacagagtggtgtgtgcgtggcgtggccgatcacctcgcgccagtagatccaactgcccggcgagagggtctcgatatcgacgggcttggccggcatctcctccagggcggtcgtctggctcagcgtctgccattgctgcatgtcatctttcagggtggcggtcccatcgaaccagagccctgtgaagtgaaagagcactaggcccgccagtggaaccagtgctttgaaggcccggtccgagcgattggccgatggggtcggtcctacctcttgtgacgccgcatccttgtcgccaggctcattcgccagcgctgtcttctgagcggtcttcatgggcccgaagtcacagtccaggaggatgtgcaggaaaacgaacgcgatcatcagcaggcagtagaagcggaagctcagggcgtcgaagaacatggcgtatccgctcttaccgatgccgagcgtgccgccgatttgcccgagaagaccgacctcgaaagcgatccacgtgctgacgacggccagtcccgcgatgggcgcgctggtggcatcgacgagaaacgccagtttctctcggctgatgcgaaaccggtcggtgatcggctgcatcatcgacccgacgacgatggcgttggtgtagtcgtcgatgaagcacaggatgcccatcagtgcggtggccgcttgagcggacttgcgccccttgatccacctcaggagccagacgatgatccctcgaaacccgcccgaggcgataagtatctcgatcatcacaaagatcggtgggatgaacgcgagaatctggaggtaggtgacgtctgtgaccgtggccgtgacgtgggtggccgatgtcttgaagccctcgaaccaggctccggcgctcaatggagtcggcggaacgtggctgagcaggccgcctgtgaggatggcgattcctagactgggcaggacgcgacgcgtcagaaaggccagtacgatggctagcaggggggggatcacgctgtaccagactgccccagtctcggtttcctcggcccgcccgaaccaggcggccagggcgcatactccggcgaagacagtcgcggctgctgcaattttggtgtatcggcttgctttcaatggactcccggcactgatgggtcgatttgcagccgtcggtacgaatcggcgcccggcggcgtgactgtcaccagcattttcccgaaaaaggcccacaaatcaagtccaaatgtgttagttcgacgcgaagggtcttctgattggacggcgcggctaagctggcccccgcgcgccaccgttccgatcgcgacccgtggcgtgggtcctatatcctcggcgatggtggtccacactggctggttgtgtgcgtcgtggcggggcgccgaacgttgcgggcgatgtcggaaaggccagcctcgacaggggctatggggccggtcactggcggacttgcaggtaaaatctgcgttatcagtactagtatctgggttttgtgcttgcatgttcccgccgtcattcataaattgaatagtgatagcgaggtggaacgcctgggtctgggtggcggagcacacggtggtttgaggttgtaggagtgcaaggaatgaaggtggtcttgttcgtagtgctcgcgttcacgcttcttctgggtggttgccattccacaaatcgcaagggcctaatccaggccggatacgctcctgagtacgttgacggctatgtggatggctattcggcgggatgccacacaattggccatcccttctatcgcttcgaaagaaacacctctcgatacgaagaagaccatcagtacaagaggggatgggaagacggtttcacgattgcacgctgtgattacgccgccgtgtggtaggagaggggccggctcaaggggttattcatttcattgagtgttcagcgctgtcgcagatgttctccagattgcccatagacgccgccgcagacgggtggcgcaggttttttcgtccacttatgtttgtcaaagcgacgcgcgttcggagcgtgcgcgggccaagcgcggccttcccgggagaggctgctgccgcgccaacgtgttggtcaggcggcaatgggcgctcgcccgctgtgagattctgcggtttgtaggttcctggtaggccgtctacaggagcaccacctggtcttcctcttcaatgggttcttgcactggttggccttgaggtttgacggagacttggattccttccgggctctcgcaggcatcgagaggcgaccagcgactcttggccttcttgacgatctcgatcagtcggccaatcacggtatccggcgtgtcgtcaaacgggtcgacgacgaggcccttcagttcttcgaacaactcatcagatactttgaccgttctcatggtcttcctcccatcaacggggcgattcgttcctggtgtcgcacgccggaggcgtacgcatttgtgctacctaaacaatagaaacaaaccgacccgttgcccaactcgctaggatcccctcgtggagaaatgagtcttttgcgtcgatccccagggggaatctctgcacgtgaggattcagtattgtggtaactacgtatttttgccttttccccaagatgtgaaggatttgttcttaacctccgtccaattccatcgagaacaagcatggcaaagcaacggtccttttccggggcctggctggacgatcgagatgcgctgagacgcgtcgttatacgtcatcggtctggatgagaaagccggctcgatggcgaattggtgcgccttgagcatcttcgcagcggtgcgtggccccggagtgatctcgacggcgttgtgaatctgtatctgtcagggaggctcgatgaagccgaatggaatccaggatacagcggagaagacaaggtatcgcatcgaggtcgccagctcgaaggatctcggggagcttgtcaggatgcaaatggccctgcaagagagtatggctggggtcgggacgaatatgctgcatctgaatcgcgatagtgttgttcgactctatgactattatcaacagcagatcggcgacgaccaggcgcggttgctggttgcctgcgacagtccgtccgagcagatcgtggccatgggatcgggccggatctggcggcatgcagactatgtcccggctcgctccggcgagttgatcgatctttgggtcgagccggatcacaggcgacggggattggcgggacgcatcgtcagcagtctcctcaagtttttcagggctaaccgggtcgagtttctggccgtcaactacgtgcggagcaatccgggggccgaggcgttgtggaagaagcttggttttcgccctatgctcatcacagcaacagccgatcgtcgtacggccgaagcggtgatgggcgcggagtcccggcgcattgtctccgttgcccgcggggcgacggtgggcgagcaaccggcttacgccggcatgagtctgtcgggatgacccggcccgtgtggaccggaccatccgcaagagcgatgcgctgccctctggctaagcgtagggcaagttgagaatcgaattaaccaggatcaccaccacggcggccgcgatggtcagccggccgctggcatgcttggaccgggtccaggagagcaatcccagagtcaaggccaccaggcccaatatattagcgacggccaggaatatcgcgatatcaccgataacgtccggttgggcctgcgcggcgaccaggcgaacgcggttagctccctggctgatgagtccccacggtacggcgccttcggctacctcgttttcctggttggcgttgttgtagttgcacgcactgcctgttgccagaagcgcctgcccgctgatgaaaacccaggcgagcacaaccagcacgagacttctcgtttgtcggttcttcttgcttctatgtgatagagacatctcgtcccccccttagtcgtcatggacggctatgtgaattcagatgtgttctcggttcggttcgtcatcgccatctgtccagacatacttcaactgtgcccatgtaaactatgcgaactgtgaaacgtttgggcaagtggacgtcccattcgatggcctcgcgcgatgtgtatcggtgtcgttaccgggccttgcggccggtctatttgcgcgcgaaccggattcccggggcgatggcgggtttatgagggttgtgaaggcgtcgtggccgacacctggggattgttgtccgagaattgccccagatgcgaggcccagtcagccatttgggcaacctggggcatgccattcaggaaagtctgcaggttttccatgtcctgcatgatatatcggacgatgtcccgaagttggccggtcatggcgatctgctcggtctgtagccgcgccagttcggcgcggaccgcgaccgcgatgtccgtttgcgtgacgattccgctaacctcgttgtcgaccatgacggtaagccggtgaaggtgcatctggtccatcttgatgcccgcactgaggaccgagcagtccagcggaatcgagatcatggggaatgacattatatcgacgacctgcgtttgggcgggatcccgacggagggccacaacgcggcggagcacgtccttctcggtgacaatgccggctgcgcctttgtggtgggtcgcaaccagacacgaaacacctcgagacgtcatgatctgagccgcttcggccaccgacgcgccggtattgaccgtgacgacgtcggtgctcataatctgggatacggctttgaggggactgatggagatcagacctctggtgatatccgtctgtgtggcgatgcccacgagtcgaccggcgtctacgaccggcagacgcttgatgcctttgacttccatggttttgccggccgctatcaccggcgtgtcgggtgagacgacctctacaggactcgacatccgatcgcccacgcacaggcggtgaaattctacattggaaccggcgacccctttgagtacatccttgtcggtgagaatgccgatcaccatctcatcgtcaaccacaatgacacaggagatactgttatccgacatcttcttgacggcggaaaagacagtgtcatcagaggttacggtgatcatctcgcaattcatgatgtcgcgcatccgcaggtcccgacgaccctcttggcgggggcgacaagagagctgctccgattctgcgatcagtggagggatctgtgtgatgtatgccatcggtgtattcctctaacaagcctgtgtttttcagcacgcgcctcgtttgcgtttgaccaaggtgatcaccaggtgctcaagcaatactatcggtgtttgcaggctgaggcttagccgaaagctgccctgattgggcatcttacgccacaaaatacgtatttccccttagtcgtgccgtcggacaaggatttccgtttttgcccggattctatttgacagatcttgcttgattttgtacactagccaacaaacttctgccggtgtcgatcttgagtagtc

SEQ ID NO: 942 - DNA, 103614 bp, Artificial Sequence
  Synthetic Oligonucleotide
gtggggtattttggaacggccaacttatcgattcagtcgataaccggcaacggttatcacaaataagtattgttacccaagaaccacttttatttagtgaaactgtatccgaaaatatccggctcggagataaccagattgacgaaaccggcgtccagctcgctgttcaatattcacggctaaccgatgaaatgcgcctgtttcccaatggcttagaaacacttttaggacaacgtggcatcgaattgagtggaggccaaaaacaacgcttggcattggcaagggccttggcgagaaaaccccgcttgctattacttgacgatgttaccagtgctttggatgccgagaccgaacagcagttttggttgaactttcgcacccagtatcctgaaaccgccgttctcgtagtcacgcaccgccttgctaccgcagcccaagccgatgaagtcattatgctggaagaaggtagaatcgtcgggcagggaccccactccgtattacttaaaaccaatgaacgataccgacaatttgtcgagcgggaagaagatgaagaagctgtagcttagtagttgtaatgtaattaggaaagtttactacaatatcagattaattacttagtttaataacatttaaaccaattaccatatttagtataattcaaataagcatcttataatgtgagcgttataaaatcaaattcgttttataacagagttattttgattgagcaaagcaactcgagcttattcctcggaaacatgatgaaacaacagtttatgctccaagagaaaaaacacggtactttgtacttcgttgttacaaggtgtaaaacctgttttacagttgtattcctaagttattgataatattgcttatataaatatttttatcgtgttaaccaatcgagtttcttgctttaacaaaaaaaaaactgtactatatagccataattaaatcttcttcttcaatatcgttcagttcggagcattaaatgagtaataacctccccgcggatagcgcattcacaaaacatgtttctgacgtcactcaacttatattgcaacagcgaatagagttgagtaaacaacttgaacaacatgattttgaaaaagcgaaagtcaccaccaatagcattcattccctattagaaatcctgatccaactacaggcaatcgaaactgactggcaggtcttgcaaggtcaaccgattaccggtgtaccaacgctcgccgcaatcaaaatacccggcaagcgtggccgaaaaccgaaatcgctcttattgcaaaccggtatcattccttctattgaagtggctggctctaccgagaaaaagaaacggggaagaaaacccggtagcaagaataaaccgaaactcgaagttgaaggcgcaccgaagaaaaaagaaacccgtggcagaccgcgtaaaaatgctactcaagcaccccacttaacccaaaaagattattatcgcccgatattagaagtgctgcgcgataataaaggcccgatggaatacacccattgccgcgatgttgttcgttcacgtcttgcaccaacctttcaagccggggatactgaaattgttggcggaactgataccgaacgctgggcatatttaattccgtgggctcggatccgccttgtaaaagcgggattgatgaaacaagattcaccgcgtaaatactgggaaatttccaacctcggtttggattggctggaaggaaagcttgatatcacacctttacagatagataaactggaacttccttggttggtcgaagaagaaacaccggaagaaaaacttctgcggttgcgcggtcttaaaccagcatccgagtaattaaaatttactattaaaaacgccacggtatcgtggcgttttttttgtttagatgtgcatcttcacgcaattgaaacgattcgactttaaccaaaaacgcgaattttataattcaacaaatcttcagtattttagtgtacatcatcagttctgcttttgtcgctatccaatatgcacagaaacaccttacataccggacttaaaggacgcacaaatgaatgaaagtttttcacgtcaaatcgctcgatttgcgtgcaatctccgatacgaagatttaccggaaaaagtcgtacaggaaacgaaacggtttttatttgattccttcggttgtgcttttggcggctaccacacaaaagacgttaagattttacataacctctacaccgggataggtggttcgtccgaagcgacggtcatcggttatggaaataaacttcccgcagtcaatgtcactcttattaactcattgatgattcgtgcgctcgacttcaatgatatctattggcgcgaagatccgtcccacccatccgatttaatacccgccgcattatcaaccggtgaactgtccaatgcttcgatgaaagaagttattctcgcaatcgttctcgcttatgaattcgaacaacgtttgtgtgaatttgccgtactcggtgtgcgggaacgcaaatggcatcatgccactctgacgcaattcgtttcaccaattgttgcgggaaaattgttgggactgaacgaagaccagatggtgaatgcaatcggaatatccggctgtcataatcataccatcggttgtccgactgcaggtgtcctcaccatgatgaaaaataccgtcgacccgatggctgttcaatctggtgtatttgcagccctactggccaaaaacggttattcaggaactgagaaagtatttgaaggaaaagaagggttcatggattgtttcggtgcgggatgggacgaatcgaaattggtgggcaaccttggatcttcttataaaatacttgagtgcggtatgaaaggatttcctacagaagcgcttacccatacccatattactgcaacactaaaagcggttctcgaaaacgatattcacccggatgagattgaggaagtagtcgtgaccaccatcgctcgcgcttgtgatattctgtttgattcgcacaaatacgaaccgaagtcgcgtgaaaccgccgaccattcgctcccgtattgtgtagcacgcgcaatattagacagaaaaataactactcaatcctttactcccgaaaaaataaacgacccgaaactttcggaagtaattcataaaataaaaggcgaggcaagcgtcgaatttgaacaaatgttccccgccaaacaaccatctcgcgtcactattcgtctaaagaatggtaaaacgtattccgtgtatcttgagtatcccaaaggcgaccctcgcgaaccgatgactattctcgacatagaaaataaattcaatgcgctttctgatgcgctgcttacgtccgaccggcaggcgcaattaaaagactcgattttttccgctgaaaaattcgacgcgcgttcattcatgaatttattcaaagtgtaagcggatactgcgtacatagctatctttgattttctttaacaactttacttgatttgctaaaatggatatccacaatcttgacccgatttttcacccgaaacgtattgctcttatcggtgtgagttccaatccgaatagtgtcggtggaaaagtgctctccaaccttgttggtggaggtttctccggggtagtataccctgtaaactctgatttcgaagcggtaatgggtatccaatgttatcccaatcttgcttctgtacctcgccttcccgatttggcggttatctgtacacctgccgaaaaagtgccaaatcttgtccttgaatgtgccgaaaccggtattcgtggtgttgtgattctctctgccggttttaaagaagccggtgccgaaggaataaagctcgagcaacacattgccgatattcatgccaagtacccgaatatgcgcatcgtcggacccaattgccttggcgtgattgttccccgcgataaattgaatttgagctttgccggtgccattccgcggaccggtaacgtagcgtttatctcacaatccggtgctttgtgtacttccgtcctcgattgggcactcgaagggaaagtgggattctcttatttcgtttcgattggaaattcactcgatgtcgaatttggtgatttaatcgactacttcggtgaagatgagaacactcaatccattgtgttatatatagaatcgattcaagaagcccgaaaatttatgacagccgcccgtgcattcgctcgtagtaaaccaattatagtttacaaggctggcagatttcctgaatcggctcaagttgccgcctctcatactggtgcgatggcggctgaagacgatatttacgatgccgcattccagcgcgtcggccttgctcgcgtttatgatatcggtgacatcttcgatgtcgtcgcgttaatcggcaggaacaaatttcccgaaggtcctaacctcgcaattgttaccaacgccggcggcccgggggtaatggctaccgatgccctgatagctgctaacggggtactagctaaattatccgatgccacaatggaacaactcaacaatgagttaccgccaatatggtcacatcggaatccggtagacgtattgggggacgcccgcaccaaacgtatcgaaaaagcggttcagatcgtattgaacgataaaaatgtaaatgccgtcctcgttattcttactcctcaggcgatgactaatccgacaggaacagcgaaggcgattgcaaaattagccgatacctcttccaaaccggttctggctgcttggttgggcggtgaatcgatgcgtgaggggattcgcatccttattgataatggtgtagccgcataccaaactcctgaacaagctattcgttcatttatgacattggttcaatacaatcggaatctccaaacactttacgaaacacctaaagatatcgctgtcgaattcgaatgggatcgtgcacaaaaacatgacgaatttctgagaaaaaatggcattgtcgatggaattatatccgaagacgtctcaaaacagttacttgaaacctatggtattcctaccgcccgcccgattcctgcttccacagctaaggaagcggtaacagtggctggccgtgtcggttatcccgtcgtcttgaaaatactatcacccgatattacccataaaagcgacgtaggtggcgtggtactgaatgtcgaaaatcaggaaatggtgatttcctctttcgaacggatgcttgaaaatgttcgggtcaaacaaccatccgcaaaaattgacggtatctccgttcaacccatgattcagttcaaagattcactcgagttgattgctggtatcaagcaagacccggtttttggtactatcctgatggtagggatgggtggcgtgaccgccgaattgttcgctgatcgctcgctggcttttccccctttaaatgagcgccttgcccgtggcatgctcgaatccctcaaaatttttccgctgttaatcggttaccgtggccgtgctcccatcgatatcgataaactcatcgacgtattaattcgactctcttatcttgctgctgattacccggaaatagccgagttggatatcaatccgctattggtagcaccaaacgagatcattgcgttggatgctcgaatagtggtttcaagctcgcatattaataaatccactgtaccatattctcatctcgcattgcgaccataccctgaaaaattcgtttcgaaaatagtccttcgtgatggaaccggggtattcctgcgtcccataaaaccggaagatgaaccgaaatggcggaagctccttgccggttgctcgaaagaaacgatttactcacgtttccgttacttcttccattgggattcccatgatgtagcaagcaggtactgttacatcgactacgaccgggagctcgcaattgtcgctgaaatcgaagaaaatggcgagcgtatgttaattggtatcggtcgtacgatttccgatcccaatcacgataccgccgagtatgcgattttgattaccgatctatggcaaaatcgcgaaatcggcggtgcgcttaccgattattgtatcgaagtagcgaagttgcaatggaatgtcaagcggatttatgcccaaaccacgacggataaccgtgctatgattgctgttttcgaaaaaagggggtttgccatttcagttgacgaatcaggtgggtgtgtcgattgtacaaaggaattgaatatcaataaattagtttaatgaaaagatcgactctttcaaacgataaatttgatttatattggttacgtcttgattttgtatgatgataagcttagactacgtattggatggagattactgtcgcatgagcacgaacccacggaagtccctgcgtcgacaacgttgtttcaccgtaacaactgttcttgtctttcttttagttgtatatcaccttgctatcccaagtgattggtcgttgataaccaactcatttaccggcattcccgataccaattctatccgcctcgaaactactcgatatgaaaccggacatctccgtttgaattttcattcgccgaatatttcgttcgactcgattcatctcgaaaataaaaattggatgtacatcgacctcaacggtgaaacaaaactatgggagactggaaaaccctcactccctgctgttgttcgcgctgttcggctccctaataaaggcaatgttaccgtccgtgttctatcgaagcaatatcacgatactgtcataaagccggtactaccccaatggtcgctttcatcggattcgtcactcaagccgccgttctacgttgataataatacctactcaaccgacgcgtggtatcccgaacaatgctacaaacttggtgatcccgcaattatgcgggatgccagaatcgctccattcgctttctatcccgtacaatacaatcctgttacgaatacattgcgaatttatgatgcgattacattcgaacttgtaccaaataatgaaccagctataaacgaacttacaacccctccaaaaccggtacctggttttgcctcattatatcgcgacattattggtgccgatgaattagtgacagataatgaaaatgctccccccggccagatattgataatttcaaacaacacaaccagtattctgaacacaatgagttcctacatcgactggaaaaacgccagtggtcatcctgttttgttatatgatccgtcctcgcagatgttcgatccaactcctataaagacgtacatccaatccgtatacaacacggcaaatcctccgctcgaatcagttattttagttggtgaaggcggtatgggtactccgtatctacccagttattattatcctgcacaaactactgtaggttacaccgatcaagcatttgccgaacttgcaggaaatgacaatctcgccgacgtatttgtgagtcgattttcggcttcgaataatcaaacgcttcaaacgattgtgaatcgtactatcaactacgaaaaaaatccccctgtttccgatactgcgtatttcacaagtggatggggatatgcagggacttcccacgaagtatattcaaatcatactgcgattcaattcgaccttgaaatgatgcgaagccggggtatcgtgaacatccggtatgatgagcatagcgccggagttaattaccagacgatacaacaggcgacttcgcatataatgctctgggcgcatcgcgccgcatggacaggagagttgaatcctgcaatgtttttaccgtttaataacgttaaccgccccttcgtttctctcaatttgacttgttccagtggagactggtacggtgacgatgtgaccggaatccatgaagcgcttatccgctttggttcaccggctctaccatccggtgcgttgtgtgggatgtcgacttatggccatgcaacccatcctgcatataataatgtcattgcgaccggtgtctattacggatttggtgcaaacaattctgtaaaccccggtgcaatgtacctcgaaggtaaattccaattatggcgaaattttgaaattgggacccccggtagcgttaccgattttactaattggaataacgcgatgggtgacgttacgccccacatctggactgctgtaccccaatcactactgtgtaatactgttgataccgtttccgttgaccaaacacaaatcacttgtaccgtcattcatatcgaagtacctgtacgaaatatcctcgtcactgcctggaagaaaaattcatctggaataaccgaatgtttttcccgcgcgtttactgatagtgtcggtcaggtcacactgcccctgacattgcaaaccgctggcaacctgattgtaaccgctaccggcccgtttgctggacaaaattttattcccgccgtcgacacgatagttgtcaccggtaatatttcaccactgcaactatctcttaccggattctcgattgatgatgacaccacaaacggtacattcggaaatggtaatcaaaatttaaatcccggtgaaacaatcgacattttaccttcgcttcataataaccaagctatcaccttacaacccccctccgccgtcgtccattgtaacgacacgcgtgtttctatttccgactcttcactacaatggaatacaatcaatcccaacgaaggtttaccgtcaaataaccctttccgtattgcactatcgaacaatttccacaacaacgattctattcatttttcgatggtagttacttcaggcactcagcattccactttgttttttactattccagtgctaactgtaaacttagtctgtgattcagtgctgttagttggtgcttccgttctcgaacctggaatgaatgtatatacgcgtatttatgtccgaaataccggacaattcgcgttattcacacctacaagcgcaagattgatttcgctcacatcgggtatttctgttatagccgatactacggtttttgattcattacccatcgggactgaggttacttgtcgcacttctcaattgtgggaagtctccgcgtctcccctactcagttctggtactatagctgccatgatggcaatattcaacaatggtgctgttactgacacaatttatttccagcttccggtgttacctttgacgtcgaccatgcccaccggccccgatacctatggttatcgtgcatatgaccaatctgacgtcgcttatccttatgctcccgtttacaactgggtcgaaattatcgataatagtgtgggtcaacggttagcactaaacgataccgcatacaattacgactcgagtattgtcattcgccttccattcgcggcgcaatattatggtagtcgatacgactcccttacaatttgttctaatggctgggcggcgtttggcaggcaacctgtctttaacaatttccgtaattggcgactccccgcacccgaaggcgcacgcaacatgttggcagtattctgggaggatgtaatgtttgccggtgccggaagtggagtatacactcactttgattcaacttcgcatcaatttgtcataagttggcgaacagtaacaacgtttggcgcgggtgcgaacgaattccagttgataattcgacagcaggaatattggagcacaccgactggtgatgcaccaatcttgttccagtacaaatcgttccacaatatgcccggcgattcttacgaacccgattatgcatccattggaatcgcagataattctcgtcgacgcggtttggagtattcctattggaattcgtactcacccggcagcagccaaatccaaaattccaattctgccaatgctgctattttgttttccaccgcgccgtctgattcatttcttcacattttttcaccgcttggccgtgatactctgcacatcggttcacagtaccgtattgcgtggggtggtcgccgcgccatttcaaatgtaaaaatcgagttaaatcgccactacccaatcggcaattgggaaagcatcactaccagtacgctgaacaacggtctcttcatttggacagttacggattctgccaccagtatcgctcggtttcgtatcttatcgttgaatggaatagatggtgatactactccaccgattgtgataaattctgccttaccggtattacacctttcgtttacggactcaacagttttggcgatgaatgatcctattcttatctcgtggacgggttcaaatcttaccggcacagtctccatttcattgaatcgttactatcctgacagtagttggacaacactatttaatggcttacccgcaacctcgctatccaccccatggacagtgaccggagacgcatcagactcggttagaatccgcatcctttctgatgaatttggaacggtaggtgataccagtactctcatccgtattgtaccaccaccttggttccgtgttacaccataccctatccaacgaacgcttgcaccggaagataccggtagcgtttcgtactcattgattaatatgggtcaggtaccggttaccggtaatgtgattacgaataccgggatagacggatttacgtatttacggagtgttgatcccggtgggccgcactaccaatggattactccacatactcccgtcacgggaacaattactcttcccttcgatttcccttatttcgacaccacgtatagcacggttcgtgtgtcgggatatggttggattacgttttcgcaatccagtggcggtcttggtacgcagccgcaagccctcctctatactttgatgcagacatttcttactgtgtactggacaccctcaccgactgattcaattgtctatgtttccaccccgaattatgtggctatcgcttggccgaacatgtacgcaattagtggaaactttggttgtgaggtcatcttgtatcgcgacggtactatcgtctatcaatacaacactaacggagtgaattcaacttctgaaacgattggattgcaaagtgccgatcatacacaatatttcaacgtttactaccgcgaaccgctcccgccttatttagcgattaggttttttaattcacataagtgggcttcaccttcgataacaacattctccttgccgcctaatgggtggctgccgttccgcattcattgggatgcccgcggtaacgtcaacggagatacgttagtgggttcgatactattttcagccaatgacaatcacgttcaaaccaactttactgtgagaatgaatgtgcatgtgaatgatgtggcggataggtttgtcgaactgccgaaagaattttatttctatccttgttatccaaacccgttcaatccatcgactgagattgtattcgatttgtcaaaaccggcatcgacccgaatcgatgtctataatgtaactggtcggaaagtggtgacgttactgaatgaaccgaaatccgccggtcgttacaatgtccggttcgatggttcaacgttagcggctggagtctattttgtgcggcttcagagtgatgcatacacagcaatccgcaaaatcgttttagtaaaataacagcagtacctgaggtcgcaaacttcgacaaagaaagtatgggcggacctctgtgtccgcccatagtctgttccttccttttttcgtaggacagaattcattctgtcccttgagagtttcctttaatttggtagtgcgggcgtccccgcccgcactccactttcctaaatagttttcctatcccgtccaaatacccaattgataaatcccgccaataccaacgcaccggccaatattgtcggtatcagaatgtcaggatttcctgtactcaaatttgagctcagcttggatagtagaacaccaaatactgttactgtcatcagcgcaatcgggtttcctattgtgattttcttcaacaatacccaaaccaaaccaacgaaaatgatggcattaatcataccgaacaacatctcatttcgatacaacggttcaagcggcattgaaaccaaaatcgcgacaacaaaaaacaatacacgtttccaaattgatttcccggtcgctgaccagatataatgaatgaatgcaatcaagactaccaatcgaacaaggtcttttacaagcgtgctcaatatctcaaaaaaaggatacggtacatacaacgacgaggcggttgaatcaaaccccactggtataaatcttggatggttaccgaaccagaaatcgggaagtgtgtgtttgatgagggatagcccgattgccgccgccgccgcgaccagaactgttgtcaggagattttcatgtttcgcttctttgattcggttaccaagatcgggatacaatccgcttaataaaccaaaactaagcacgacgaaaatccattgcccgatgctccctacaataattcccaccagaattgtaatcttaaatatcgaccacggaacttccggattgacgatatatgtatcgtacaaaaccggatagatatttaagctgccaagaacaaaaacaatgcccggcaatatcgaccacaccatgatccgtttccacgggatgatgcccttccgtgtaaattgcaataaccgccaaagcatcaaaatcgcaacaaccgcaatggctaaaatgatgagacccttataaagcccgcgtccgaacgtcatcgaatcttgctcgcgttcgaatttttccggcactttataccaataggaaccgctgacattaataaaatgcccgactacaaatgcgctcaatcggtatttcgcgtctccgacatgacgcgggtcgccctctttcgcttcgtaggtaaaaaattgatcgacccgtttcggttttacctcttggtaataatctttcaaatcccacttactcaaatcaattccgcgtgaaacgagtatccgttcaatccttgttcgcgcagaatctttcgacagcgaatcgcccggtgcttcttcgggaagaatgatacttaaattttttatttttcctgacgtcgcacctactttggcaaaatatttcgttcgcgactccggcttaaacgcacgaacatttattgttttctcgccgactcgctctttaataacttcgttcgcttctttcacgctgcgtacccgtttcatcagatacgactcaaatgatcctttccctgacaatgacactggattcaactggacataaaatgttagcgtatcaggattcgcccacccgcaactccgcaagctgtccgcaaccgtcttaatcgcttgctggttcgtaatcggaaatgaatcatcttccccaaatttcgtaacgggtacgagcatcaaaataattcccgcagtaaataacaaaaccgcaagaacgacaccgccaactaaaactttacttcccggtttctctacagctttccctgtggatacgctgatttctgcagcactttcaatctccactttttcttcagtgctttcacctattcgcccaaccggcacgctatctgcattgctcatccccgtctccggttcaaatgaacctttacgcaggtaggcgataaatgcgagcaataacggaatacatagcaatcctgccgcgatggcacccgtaacgatgaggtacatgttactgcttcggaaaaataggaatgaagtataaagtgcatccaccgaatagtgccaaaccagagttgcgagaataccaaaccggagcatgaggataccaacaatcacaccagcgataccaacttcgagacccctgatgaaccacggctcgttcggataagtcgcatggccgaaaccccagataaacgctgctataataacagccagccatgttactttgccccggaatagtttttggagaaaaggtatcgagaacgcgcggctcataaattcttccgataccgctgggaaaaatcccatcaacaacaccgctatccatgggaacgaagttttaagcaagtcatcgtaaggcacatccaccgggctccacgcgccaaaatgattcgctatcagataaaacgcaatctgatatgcgaaaaagaacgaacacatcgttaaaccgagtagaatatttttaaatgccgatttcgtccgcaagccgcgaatcgtaaacatccgtggcatcgaaattttgtctggataccgttcacggtacattgcttctgctgatgcggtcagcagcataatcgagaatccgacaactgccgaaacgccgatcatcgttccaaattcttttaacaaatatccagaccaaggatccgtcgtcatgtagttcacgaacccagatgtgaattcattgagctggttcatcaaaaagagaactgtaccgatcccgccaaaccacagcgctgttcgccagtgaatatctttctttcgaacccgtatgaagaatacaattccgattgccagcgcagtcagaatgaaaaagatgctatccacatctcccgctgcatggttataactgcgcatctttcggaaactagcgccccatgcttccgggacaaacaaatattggtaaaaacggtctacccgcgccccttggacggtgacaaaatagcgatagtcggaacccttaaccggctgaatcgtcgtatcccggtaagtaaaagtccaatctgtacgcttcggtcggcctactttctctaccgagtagtaatggacgtgatttgagtcgagtttgtagcttgcataaagaaaattctccgctaacttcttcgcggaatcttgttctaagttcggtcccaccgcttcttccgggagcaagtggctgaattccgccagtttcccgtccacagtgacatttatccggtattcttctttttcacccggtttgaaccaacggtgaaaccaaaaccacatcaataccggattaccgtaatatttctgtgcggcatcattccccaactctttttccagatacgttttcgcgtaaccttcataagtgaatgcgctgccatgcatataatctgctggaggcgtaaaaccctgctcatgcaaatatttttcagctaccggttgggagttgtcgcggtcgtatttgaaatcaatggatgcttcgggaaatgcacgatggaagtatccgcagctgaagaaaataccgccgacaaggattgctaaacagattacgacgaaataccaatcgttccgcgttagtcgcgttgaattcatagcggctcctttagtcaaatggaaggaagaattgtagaatatcgaaaaatacctgtcatgcttcgtaaatacaagcttcttccataattcttttcgatttatcccggctggggtgccgaaagagatgacttgatgcatattttttcgtacgttatctacttgagttacttgggataaaacaacatgaaagacatcgtcgtcggaatcgatattggtgcgactaatactgcaatcggtgtagtggatcatgatgggaattgtatttcctccacgaacatcaaaacaactggtcataaacaacctacggattacgttaccgctaccgcgaccgccattactgcactcatcgcaatacatcccgaatttcttctaaaaggaatcgggctcggcgctcctaatggaaactattatagcggtacagttgagaatgcaccaaacttggaatggaagggaattataccctttgcgaaaatgtttcgcgaacgatttagcgttcctgcagttctgactaatgatgcgaatgcggcagctatcggagaaatgattttcggcggtgcgaagacgatgaaaaatttcatcgaaatcacattaggcaccggtgtcggaagcggtattgttgtcaatggtgaagttctatatggacacgatggttttgccggtgaaatcggacataccatttttgatccgaacggacgtgactgtggatgtggtcggaaagggtgtctcgaaacctacgcttcggcaggtggtatcaaacgtactgtgtttgaactcatcggacaaaccaacctccctacggtttttcgcaaccagagcttcaacgaagtgactgctgaagcgatagcaaaagccgcttccgcgggtgacccaattgctttacaagcattcgagattaccggacgaattctcggtattaaacttgccgatgccgtcgcccacaccagcccggaagcaatcttcctgttcggtggcttggcgaaagccggcaaactaattttcgaaccgacccaccgtcacatggaagccaatatgctcaatatcttcaaggacaaagtgaaattacttccgtccggtttgcctgatgaaaatgttgctatcctcggttccgccgcattgatttggaaagaactcgataaaaaataattttgagtgttacccttcattttggattaaggatttgtaaatgagagtagtttgcgccgttttgtttctcaccacgttcgcgattgtatcattcgcacaggatactcaaccgattacttccacatcgcactaccaaacctatctctgttacaaaacaacttcaccgattgcaatcgacggtaaactaaacgatcccgcatggctcgaagttccgtggtcggaaaagtttgtcgatatccaggggaataccaaacccgtgcctcgcttcgagacccaaatcaaaatgcggtgggatgatacctgtttctatatcgccgcccaacttcatgaaccgcacgtctgggccactttgactgaacatgatgccgttatcttccacgacaatgatttcgaagtattcatggatcccaatggtgataactgggaatatggtgaaatggagttgaacgcactcaatacgacatgggatttgtttctccccaaaccataccgggataacggtagcgctgacaatagctgggaaatcactggaatgaaaacggctgttgcaattcagggaacgttaaacaattccgccgatatcgattccggttggaccgtcgaaatagctatgccgtggcgcggtttgcagcgaataagccacggcacaaaagccccatccgaagatgaacaatggtacatcaatttttcccgtgtcgaatggcaaaccaagatcgtcgatgataaatatatcaaggttgcaggcaaacccgaagacaattgggtctggtcgccgcaaggggccatcaatatgcacatgccggaaaagtggggcgtcgtgcaattcacatccaaaccagtcggtgaagcaaaatttcaggtatccgaatccgacgatataaaagattttatgcatcaggtgtactatgtcgagaaaaaatattttgaacaaaataaaaaatataccgatgatatcgcgcagttaaatcatatttcacccgcattgatgaagcatgcgaaaaccttacggtcactgcacaccactgatactggcttttcggcggaatatgatgcccgcctacgtgtcgggttgggtgtcgccaccatcgatcaggattcccattaccacttcgggtaccaatttgatttagaagataaaatgtacaacaatcgctaaccccaccactttcttacggagccaccaatggaaaaaaaaggatataaatccgctttcgcaatcgtaactttgctcttcttcatgtggggcttcctaacttgcttgaacgacattctcgtcccgcacctcaaagcggtattcgacatgaattacacccagaccatgctgatacaattcaccttctttggtgcctacctgttaatgtcgattcccgctggaaagttgattgcacgcatcggttatcaattgggtgtcgtcgccgggctttgtaccagtggtatcggtgcgttgttgttttatcccgccgctggcatgctttcctatcccctctttctactcggtctgttcatccttgccaccggtatcaccgttctgcaagttgcagcaaacccttatgcgagtgtccttggtaaaccagaaacagcatcgagccgattaaatcttgcccaagctgttaactctttcggtcacactaccgctccctacatcggcggtattttgattttgggttctgcactttccgctgaacaaattgccgcgcttccttccgttgagcaacacgccgctcgcatcacacaggcctcttccgtccaaatgccatacataggtcttgcaatcgcattattcgttcttgcccttgtaatgaaactctttcatctccctgttatcgagaccgtcgagagtcacgattcgaaaaaagcccacttgcgcgatgcactgaaaatccgccacacccgtcttgccgcaatcggcatttttctatatgtcggtgcggaagtatccattggtagttttctcgtcaatttctttggtcaaaaagaaatcggaggtctcacccccgaagttgccgcgaaatatgtctccttttactggggtgccgcaatggtcggtcggttcatcggttcagccctgttacaaaaactaaaatcacgcggtgtactcgcggttgctgcgaccttcgccgcgatactcgtagtcaccacgattatgcttaccggtacgcctgcgatgtacaccattcttgccgtcggtttcttcaattcggttatgtttccgattattttcacgcttggcatcgaagatttaggacatctgaccagtcagggctccagcattcttgtcatggcgattttcggcggtgcggtaattccagaattgcagggtgtacttgccgatagtatcggtattcacaccgcatttttccttcccgcgctctgttatttgtatatcatttattatgcgctggtcggttccaaacatccgaccacgaatcgtgttgccgcttaattaaaacacaagtggaaccggaacatatttgtaacgtgaggcgatgatgaaaccttcaactattttcaactacattaaacgtacagttgtcgcatacgtgatttgtattactgaattcatttgtattcctgttagcaatgcgactgtgagccgtaaagagaccatcccgaaagaatatcttttgatgtatgttgcaccggcagcgatagctgccgtggtatttgccctcacctacggattagcggctgccaccaccaacagtttccacatgaaacagccggtagattatgtcgatccgttcatcggcactggtgggcatgggcacacctatcccggcgcgactgtccctttcggtatggtgcaactcagccccgacatcgggaaaagagggtgggactattgctccggttaccactattccgattcgatgttagttggatttagccacacccacctcagtggaaccgggtgcgctgaccttggtgatattctatttcaaccgatgattggcattcctgcaccggatacattgatgcactttcggttcgataaaattattcatcttgtaccatccattaaaggagtaagtttcgtcgacatgaaagtgtactgcgaaagtgctactcccgggtattatcgggtggaactaccgcaaaatcacattacagtcgagttgaccgccactgaacgttgtggtttccatcgctatacctttcccaaatctgattccgcatatattgttattgatgcaggatatgggcaggatgatagcccccttgaatccacagtaaaagtcacaggagcgaatagtatcgtcggtagccgccgttcttcgggctgggcatggacacagcaggtgtacttcgcggctgaattttccactcctttcgcttccacaaaaatggtgcgggaaaaccagtgggtggataatccctacgaaacgagcggaaaaactgccaaagcggttctacgctttaaaactgaaaaagatgattcaattttagtccgggttggaatttctgccgtttcaattgaaggtgctcttaaaaatctccatgctgaaatcccccgttggaattttgattccacacgtattatagcacggacaaaatggaacgatgaactgagtaaaattaaagtggagggtaccaatatcgacaacaaacaaaccttctacactgcgctctatcacacgatgtgcgcccccacgctgtttcacgacgtcgatttccagtatcgcggcggcgatggtaaaaaccatcttgccaccaactaccacaactacagcactttttcattatgggacacgtaccgtgctgaacatcccttattcacaatcatgcaccccgcccgtgtcgtcgatatgtatttttcgatgcttggttttcaatctgaatacggctatctccccgtttggccgcttgccggttgggaaacacaatgcatgattggctatcattccgtacccgtaattgccgatgccttcctgaaaggtctcccctttatcgacggaaaacgagcgctcgatgcaatgaaagtgagtgcctttgccaaccataaagggctcgaatattataacatggcgcaacccgattccatcgaaaagaaattagcgcaactgcacgaaaacgatatcaattccggtttcgactataaatcccttcgtctcgataagcacagagtgttgagtggatatgcaaaaaccatttccggcgaaccgattgactaccattcctcttacccttacgtgacaaaggcacttcttgttcgcgctaccactggtgacatgaaaattgaatggcaaaccgaagcgttaccgcaatcgaatgatgattcgatggttaccttcatgtggcttgccggacgttcggtaaacaaagggtggcaccggttcgatttattagtgaatggtgagaaatggttcacttttaatactggtcgtgaccggaatgataaaaattggactgtcaccaacacgaacggttcatcactcaccttcgtcccgactttaaaagatgtgtacgatgatcaattcggcaatatgttcctgcaggttcctaccgcattactaaagaaaggtcaacccctcaatctcactatcgttggtgaaaaaggcgatagttacgattggtatatgacattcgagtatcaaaaccaacccggtatgaaatttgaaaccgattatgcactcgcggtcgataaaggtgttaagcaacagtttgtccgcgtgatggtcgaacatctggaagcaccggcgtacgcgaacatttcagttgatggaaatccgacattgaagtcgtggcttaaccccggtgtcaatctttttgacctgccgtttgcagtggtgaattccgtaaaaaatattcgtgtatctgtttttacgaattcgttgatggaatcaaattacaccattaagccattcaagactctcgagtatgttcccgctgaccgcgagcgagagtccgtttccaagacgctcgaatatgcttatgacgattggtgcattgctcaggtcgcgaaaaaaattaatgacaccgccgactacaatctctttaccaatcgttccggttactatcgcaatctttacgattccactaccggttttatgcgcggacgtaacttcgatggctcatgggtttccccctttaatccccgctactcaaccgagttgcaacctcaatacaccgaagggaatgcgtggcaatggacatggtcggtgcaacatgacattcccggattaatcaaactgatgggtggtgaggcaaaattcgagcagaaactcgactcccttttcaaccagagttctgatttatcgggaaccggtgctaccgccgacgtgtcaggtcttatcggaatgtatgcccacggcaacgaaccaagccatcatattgcttacctttatgacaatattggcaaggcatggaagacgcaaaaacttgtccgtcaaatcatgaacgatttctacacgaacaaaactgatggtttgtgcggaaacgaggactgcgggcaaatgtcggcttggtatgtattcagtgcgatgggattttatcctgctaatcccgttggtggattctaccaaattggcagccccttattcgataaagtcacaataaccttgggtaacaagaaagaatttatcattgaagctgtcgacaattccgatcgcaacaaatacattcaatccgccaagttaaatggaatgccattcgaaggtagtttacgtcatgaacaaattctccgtggtggcaaactcgtgtttaaaatggggccgacccccaatccaaaatggggcatgattgccgattagaggtgatttatgaaaaaaatcaatttaatgctactcggctcgttgatactagttgcactcgtaatttcaagtgcatctgccgcgccgtttcgcgtgatgacttacaatctgcgctacgacaatcctcaggactcccttgacaattggaagtaccgccgtgacttcatcgtatcgacaataaaatttcacaaagcggatatcctatgtattcaggaaggactcgtccatcaggttcacttcttggctgattcactttccgaattttcatggtacggtatcggtcgtgacgatggtaaaaatgctggcgagttcagcgccatattttacaagaaaaatcgctttatgcgaattgacagcggcacattctggctttccgctacacccgaaaaaccgacaatggggtgggatgccgcttgcatccgaatctgtacgtgggtaaagttaatggatgcttcgaatggtgcgatttttctacttaccaatacccatttcgatcatgtcggcaaagttgctcgtatcgagagttccaaattgcttcgtttgagaatcgcaaagctctcttccgacactctccccgttattacctgtggtgatttcaattcctccgaaacagattccgcatacaccatcatgaccactgctctccccattccccaattgtacgataccaagaacatctcgctcttacctcatcatggcccggcaaataccttttccgggtttcacgtcaaagaagggataatcggcgagcgtatcgattttatttttgtcacaaaatccatacgggttttgcaacatgccactatatccgatttcaaagatgatttgcgtttcccttctgatcatcttccggtaattaccgagattgaagttccacacgcgataataagaacatagaactatatgaacctatctatacttgattggctgattgtcgctatttcgatttccggactcattgcagtcgtgatgattagcaaacgctatatgcaatccgtcgccgattttctctccgccggacgaactgccgggcgctacctaatcagtgtatcgcaagggatgtctgccctcggctccatcactattgttggtatgtgggagatgaattacatcgccggtttctcactccgatggtgggaatttacgatgggtatcgtcctcctcatcattaccgtatcgggttgggtaatctatcgcttccgccagacccgcgcattgacgatggcgcaattcttcgagatacgctacagccgccgtttccgaatcttcgcaggactgctcgccttcatttccggtatcgtcaactttggcatcttccctgccgtcggtgcccggttcttcatttatttctgtggtttaccgcaacattattccgttgccggattatctgtcccgatgttcccaaccgtgatggctgtctttcttggtatcgctatctatttcctttttgctggtggtcaaatcgccgtcatcatcaccgaatttattcaaggcatcttcgtcaacactgtctttatcatcatcgtcatttatttcttgatgacaatcgattggaatcaaatcttcatcggcctcaccgcggcacccccggatgcttccctaataaatccttaccacaccagcaaagtaaaagatttcaatctttggtactttctgattggtgtggtcggcgtgatttacggaaagatgtcgtggcaagggacgcagggttacaactcttcagcgaaaagtgcacacgaagcaaaaatgggagaagtcctcggcaatctccgtgacattcccaaatggctcatgttgatttttgttccgattgtcgcatacgtcgtcatgcacaataaagatttcgccgtcgttgcctcaagcgtcaatgatattctcaaaggtgtcgatgccaaggcgattcaaagccaactcaccgttcccctcgttctatcaaaacttcttcccttcggtttgatgggtgctctcactactgtcatgcttatggcgactatcggtactcacgatagttatctccattcgtggggaagtatcttcatacaagatgttgtcctccccttccgcaaaaaggcattcgagccggaacaacatcttcgtatccttcgcctctcgattcttggtgtctgcatattcattttctgtttcagtatcattttcaatcaaagcgagtacatcttcctctttttcgccattaccggtgccatctttaccggtggtagtggtgccgtaattatcggtggtctatactggaaaagcggtacaacacccgccgcatggagtgcgctaataaccggttccaccatcgctgtcggcggtatcatcctccaacaaatcgacaaggattttccgataaacggtcaggagttctggggtcttgcaatgggtgcatccagtatcgtctatatcctcgtttcgctattgagtggaaagaaacgtgagtttgatatggacaaactccttcaccgcggccaatatgccatccaaagcgagatgaaagttgtcgaagaggtgccgctcaaggggtggcgaatgatgggaatgggcaaagagttcacccgcggtgataaaataatttatgtcatcgcttacggttgggttttcctgtggacggtcgccttcctgattggcacattcttcaatctccacggtacagtccccgatacatcgtggatgactttctggaaaatatttatcgtgattaatgtcgtcgtttcgattgcaatcatcatttggttttctattggtggtcttcgcgacctcaaggatatgctattccgtcttcgaacccaaattcgtgaccacggtgacagtggcttcgttgaaaagcgcaaaatgggaagtgaggaatgatgaaacggtatccgaataatcccatccttacccgcaacgatattccacccattccacccggcttggttgatgttacatccgtattcaatcccggagctattttcttccaaaacaaaatttggctaattctacgagttcaaaatcgtggtcgcgagacctcttttgttactgctcaaagtgatgatggcatacacttcaaaatctcaaacaattccgtcaacctgaccggaatcgaattgctttctgataccgtttatcactgttacgacgcccgccctactttaatcggtgataccatttacatcatgtttgcgatggatatggataacggttgcagcttaggtctggcccgcacttctgacatgctatcgttcgagtttctcggtatagcttccacaggtgatattcgaaatggcgtgctcttccccgaaaaattcaacggtaaatatttgcgcttggatcgccccaacgatttcaaattggaaggtggtccggtaacagggagcacaatttgtctctccgaatccaatgacctgcttcattggacacgaaccgcacccattatttccggtcgttttcattattgggatgagctaatcggtatgggcccgtcgccgattaaaacccgccacggttggctttgcatctatcatggagtggcgactcactttggtagtgcgaacatctaccaagccggtgtatttctccttgacttgcaagaccccaccaagcttatcgcccggggacactacaatattcttgaaccccgtgaaccctatgagctaatgggacaagtgccgaacgtagtttttcccagtggtgcgattgtgaaagacgtcgacaatgaggggttcgctcgtgaatcaagtgaagtgttcgtctattacggtgccacggatacctgcgtcggccttgctactactaccatttcccaactgcttactcattgttccgggtaaccaattcttgtcccaaaaaaagtgcggtatcgctaccgcactttttttattccgatttacttaagcatccgggaagaacaacgaagaggtcttcatcatcttcagccaaatcggtgccgtccggtccaccccgaatatgtacaggtaattatcgatatggatacgtgccgttttccatgacgtctgtagtgaaactttgtttacccatgattcgtattccgcatcgtttttggttcgtagcgattccattatcgacttgcgatttgccggattcataaaagtttctttccatgtctcgaataaatcgaatgtctcaccactcttcaccgaaggcaatgtacttggagtggtaagtactggcgcagcggtggtaggtgctggtgttggcggtgccatcgtcggaatcgaaagttgatgctccggtgcttcggctaattttatcgtcggttcgtgatggggtggggtcattggtggtttggttggtgtcggtggcatcatcggtggcttggttgataccggtagtagtgccattggtggtttcgctggtgccggtggtttcgtaccagttgtaggtgaaggagggagaccaaatggattatcgtccacgactaccggacgcggtgctggcgtaaatatcagttctgcttgtttttccggttcaaccacctctgctgacagttctgtgatactaccgccaacaaccatcttacgcgttaccacgtaatcgttgcgcaatgcttgaaatcgcgccaataccaatgctaaatcctcaactgacatttccgttacatggagcgattcttccaatttcaccacatccgcgaggacttttacttcggacatattcagtacggtaacaagaacattcggttctaatttttcgccggtaaaaccaagaccttccgcacgttcgaaaatctgctgtgcgagcgattcggcatcggcttccagcgaacgtaaatcgagtggagtatccgaccaacttgtacttgtttcggaaatggatttaccagcagcatcttgtaaatcattcatcgtaaacgtaaacgcttccaacaaagcgtattccagtcctttcgcgaccgattcgtcgtttaccgattggtcgaattgaggagaaccaagtatcctgctgatttctttgtcgacgatttccttcgcacggtcgatcaacgcgtcccgcagaactgtcgatttatcccaaccaaccagctctcggtacgggagtgaattccgtccgtgtaaaagttcttcgatccaatccgccgccatttgcgattgtgctatcgccataatgtggtcctccttactccaatattttaggaaccgctgtgtttattttgatatttatcgcgtatcgattccaattgagagagatttaaatgattaacaccgacgtatgcgacaatttctactccttgcgcaacgtttttctcgtccaatccgcgcaaaatcgccatcacgcattcaatcggaacttgcgaaggtggcatccccatttcagtgagaaagctttcaagtcgtataaactgccgttcaaccaattcccaccgtcgttcttgcgccattgagtcgatggtttcggtaaatacgctggctaaactcgattcggaaaaaccatttgttattacctgtacgacaattgcgcgaaattcggggtctaattggtcgcgggagataataatgtcgatggcattttcttttgtctggctcgttaacaaatgattgcaaaatgcgcttaacgtcggcaatggttccagtaccaatccgacttcgtatgcaatcgagcgtcgaaccaattccatccactctttcgccgagacgactcgcttccgcgccagatgattgcgcaggttagtcagcatcgtacggctttcatcgtcctgtaaatcgaatgaacccgccatcttacccaacgtaccatccacgtcttccgacatcagcaaaaccacccagtttacgatgcgcggtggaattttattcatttgaatacggtcgagtggcaatgaagtactgctgtccggccaactgctttttgctaattcgtgcaattctacaaacagctcagtgatgcgctcgatagtacggtaatcttttaaaacatcagtcgcttctaaccggaaatccacgttttctaaatcggcgggtgcaggtagtttggcggtcggcgtttccgcttcagtgcgtttcagttgtgcttcgtttgcaagcggttgttgcggtttcttcactggttcggttcgcgtacttgacggtggtggtgtctttaaattggtttgttgcaccggtctcgggtctatatctactggtggtcgttttgcagtagatggaatcgaaaaagtcggttctggtgatggattggtatgcggttgtttaccggttttagcttgaatagtttctgcggatagcggtgcggcaaacgagaaccgctttgcttccgaatgcggatccggtgtcggttcggtttcaggtaaagatagcaaatcgtccaaagcagaatatgtgagatcttcgttacctgcatgtggagcgatagtaggttccggtgaattgataggagctgacgattctggtgtttctaacggttgaacaaagtcgatatcgtcgcttaccgtttcctcttcgttttcgtggctttgttcaatgccaacattcgcttcatcggctacgcgtgctgcatcgatgaccagcgattgccatggtttaccgatggttttttgtgtgcggacgaacggcccgaccgtaaattttccacccggccattgaaacatttcgtaaaatgcgtcaatccctacattctttactgtccttgcatgaacgatgtttccgctatcgattgcaatgaccccctcgttatgtccggaggtaactttaatactcgatttccgaccgctcaatcctaacaattgaattacttctgccagatgcaagctcccgacgataccctcaaagccactctcatcttgttcggaaagaatatttgttacttctttgcggagcgcttcgaagtcgaacggtttttcgatataatgaactgcgccaagtccataacttcgtgtccgcagctcggggctggaaaaacctgtcatcacgataaattttatgttggggtgttcttggcggacgcgaaccatcaggtcgaggccggaaaggttcggcatgcgaatgtcggtaataatgacttctacgtcaggattctcttttaaaattgattctacttctaacggatccgtcgaatacaacgtctcgatattctcgtctatggaatcgaaaagccctcgcaacgcaagtacgatatcttcttcatcgtccactacgatgattttatgttgcgtaatccgactctcgatgagatcgttccgtttcttttgattttgcatcataagtcaagcggttctgttccgcctcctcgtagtgcttcgacgatatctttccatctccctttttgcgggtcaagttcggtaaattccgtatcgtggctccgttcggtgagtagtatgccaagttggactgctattttctccgcatacacttttaccaatccgagcgttgtattatcggtgaacaatgcgacaagaagatggtttgtcgataatcggacgacgaagattccgttcttttcacctttccagaatgtcgattcaaaattcgtttcgcccgctactttcgccgtttcccgggcagcgccgaaagatgccgcaaccaacgtcgcaaggccgatcatatcgggaaggtcgggtatcccttctcgcgaataaacgtatccatcttcgccgattagtaacgccagtgtcgcatgcgattcttcgaccagcactttgagtgcagtcgaaacaattgcaagtgcctgatcgtctaatgtcgtgtcccgtaagatcactactttgcgcctttcccgaagagccgcttaaaccatccgactttcgctttaggaggttcggctttgacttggcgagactgcggtatcgatgccgggcgcggttgtcggattggcgtcggcgttgcgaccggtcgcggtggcggttctgccggtacttggactggtggtggctcttggattgcttctgcgaatatagtccgtttgaaatcgtcgataacacaagttgttatggtttttaacgtatcgaataccccttgcccggtcgtagctactgcttcgaggtaagggacatttcgcgggttcaattctacattcagaatatccaaagaaatcgcacccggaatatcacgcttattgtattgcaacaccagcggaatggtttccggattcattttcaattcacgaagattggcaaaaaggttttctaaactttccttgttttcttcgatttttcctgattgcgaatcggcgacaaacacaataccatcggccccttgcaaaacaagcttgcgcgattggttgtagtaaacctgacccggaactgtaaatagttgcatacgaacagtgaatccccgaaccttaccaatttccaatggcaataaatcgaagaacaaagttcgatcctgtgcggttgctaccgaagacaattcaccgcggcgctcgttcggaagcatgcggtgaatggtctgaagattggtggtttttccgcagagtcccggaccatagtaaacaatcttacagtcaagttcacgtttggcgtaatttacagttgccatattggttcccctgattacgtcgataccaattacgattcacttggaaccgaaccgataccttctaacttatcttctaccgaatccgcaaatgccagcaaagccccaaggttactttccggctgcattaatgcggctaaataaatcgcgctactcgagcgtattgcaagtgtacactcggaatttgttaccaaaactgtattcatgccttcgcattcgacttttgctaatgcaatcgacaatccttgtattaaatttgccacccgtgggcctaatagttcggaatcgttgtgtggatatttttcgattacgattccatcgtggtcgactaattccgcttcaatcacgcggtcccgacccggtaactccgaaaacagttttgttttccgacgtggcattagtgttccaccttcgccaatatctccgcccactttttactgcggccatccggacgaaatgcatccgcttcccaacagaaaaccagcatcccgccggaaataaaaacacaaaatatttctaattgatcgaaggctgccgcaatcgttttcgtactgccgtaaggtaacgtccctgctgtttccgatgctaacgacaatgctgttgcaaaccctgcaatcgccgtattatcccggcggttaagttttcctctggtcagtatcggtaatccccactccgaaacaaacgtcacgcccgccacaccctgtacaccggcaatccggtcgaatgcgtgctcgaaacttttcggcggtatgatagaccagtaccacattttataaattctctaagaacgaagtgaaactactgacttcttgttccgcaacttgatcaattttttccgctttcgtgaggatgccttctttgttcattaaattcagccggtcgagcgctttacaccattcttcaccggataattcctcaccgcgcaattttgcttcaacctttatcgcgtgaacatatccgccgagcccccggtcgattaacatgtccgaaatttcttctgctcggtatttcccttgccagccgtgatcccggttgaacagtgcggatgtatccttgataatctcccgtacaccttgaattggctggcttgcgtatgccttttctactgaattcgaaatcaatacttccaattcacgacgggataatttgagttgaggcgaatcctgcaaaaatgccgtgacttgcttataggttggtaccgcaagtttttcccagcttgaaagatatttaacgattaccgataatgcgttgccggcgatttcacgtttgataagtgcgttttcccggcggtcgaataacaactttaccgtttcttttgccggtgtccatgtaaattggaaatagaaatgataggcatctttgtaaattttgagtacgtcttcgtatttgagtggccagggccgagtcaggtggtactgcaactgcgccattgattcctgcgggctttccgcattcatcataatcttcaccgggccgagtgaaatttcgccgccgaatagcggtgaaaaaagtatgtagagatagctacgaatcgtgccgtgagtacgatttacgatatccttaagttcgactctcccttctggagagataatcgacttagtttcggatacagcgatattttcaatcggtacttcttgcatattcactccttaccgttgagttcctactcgttcctgtgataatttttcctcgacgcgggcatgtacttggccaatttcgacgcggcgttcatagcgcgcgaacaaccattttgtctcgatatggactgcgactgctacaaagttctcaccttccatgtatgccgcgctttcacccatcccgattaatgcgtcgctctcttcaaaaattttgcaaatccgttggacgtcgctatccaaatcgctgtgtaacacatcgatacaacccggaatattttgtaacaacaattcccaactttcgatgcgggttcttgaatggcccgaaaccaatgggttgtttttcatcctcgtcactcttctaagttgatgggaatgcttggcaaaagtaatgaaatccggttccattcctcgaaacggtacggcgttataacgcctccgttcttttgtaccaagcgttgtaccgcaaataaaccgatgtccgtccccccggcttccgcacggaagaacgggtcaaacagccgcgcgagaatttccggcgacgatttcgggccgttgtcattgacccgtactactgttccactccccgaataattctgccgtagcgcttccagcatcagcacttgttccggttccggaagcgataagccgtccagtggactcgcttcaatcataatttcgccgtttgcatcgacactatcaatagcgtgaaccaataaatttaacaagatttgcaagaattggtcaggattgacgaacacggtgacctgattggcgctctccacaaacttgactttgagcttcttcaccgttatccggcttgacataagttctacggcctgttcgtaaatcgccgctaccttcaccagttccggttgttcccggcttacccggattgccgcaaagaatgattggaataaccggttaaggcgttgaacttggctggtgatacgatgcagcatctctaccgccgtgtgcgtcttgtccaacttcatttcaatgagctgggtcatccccgaaatacttgcaagcggattgcgaatgtcgtgtgccagcgccgatgccagaatctccattgaggccagttgttccagccggatccgctcttcctgcatgtgttttatcagcgaaatatcacggaaatggatgacggttccaactttccgacccaaccggttcgtgcgcgtcgtcactgagtaaccgatttgaatccggttgtagttcatatcaaatgcaagctcgtacgtccgccacggcttctcttcaccggcatgttgcatgatttccattgcgatgctttcgccgaaaatcgatgccagtgtcgatccgaaaacgatatcgttcgtcatccccataatttcgcgggcggctttgttcataaactccagccgtccgttcaaatctatggtgattacccctgaatacagcgaatccagaatactgcggctgaacatgtgtaccgcttcttcgagacggtgtaactgtgtcaggtcgtggaaaacgatggttctaccgcaaacgtcgccagactcattcctgagttcggtcagcgagctttcgataatcatcggcccgcgaagcgtttccacgtgtaattcgcgtgacacgataaaacttgaaatcggtgaattcaggataagttcttccgcttccgcaccaaatacgtcccgtagcggtacatcctgtatttgcgacgactccagcccaagtgaaataatagccgaccggtttgcgaaaatgatcctaccatcctccaacaccgatatgacgccgataccgatggaatcgatgatattcttcgcttgtgtcggcataccaaaaatcggtgcatcgctcgacccgttattttcattgttccgtacgaatgacgattctattgcatcgataacatctaataaaagccttaccgatagcggtctgcgcaataaaaatgacgcaccggtaagggttaaaaattcgagtgaattgcgttctgtatcatcggtgacagcaatccaagtgaccggcatgtcgtttggcagttcggttcgacggcggaattcatcgacaatttcggtatatccaagttcggatgggggatcgttcagaatgaaaatcgagttgcgatgttgtggggaaacccagtccagcatggcggaaacggtaggaaaggcgaaaacattacgaccagcgtactccatcgcacgggtgtaggatttccggagacgctcatccggttcgaccagaaggattgagtcgattttcactcttctcgatttacttgctgaaagttacgcgaaataacaccaattgactaagctttatctctgcaaaacgaattttagcatgtacacaaacagtgacatgcgtaataaactaactgagtcagtagcactatgtttctcttcaatcaatataaattcaaaacatagttcctacaaggtttgcagaaaattattttccgttaaagtgatgaatatcactcatgaatcaactttatcatctgagttcgatgggtcgtaatttggtaagtacggtttgtataacaatttgctttgtttatacacaaaacacgtttttcatttcatccgtatcttttttgtctttccgtaggataggatttatcctgtcccttaacaatttcattatctatttcttgtatttcatcttttgtcattccccatggcccatggccccttgcccgttgacctacttcaccaactgcactttccgcaccacccgttctccacttccccctttcatcgaaataaaatatgtcccgcttgccaatccggtcgcattccatcggtacacatgattccccgccgtcattgtttgtgtaaacaaatctcccactttccgtcccacttcatccatcaccgagagcgttatccgttccggttttggcagtgaaaatcgaattgtcgtagtcgaattaaatggattgggataattcgcttgcagtgaaaatgaacccggcaacgcttgccacactattttctggccaactgaaactggctgtgttgttcggtacacaccccgctctgttgcgcaatacaaatgacccgacggatcaagttgtatatcaaacacggaataaatattcaatccggcaccaatatcttcccacgtaacaccttcatctgtcgaccgatttagtcgcatttgacctaaggaatctgcccaatacggaacatatagtgtgcctgtagagtctatttggaaattttcaatttcaccataattaatattgatgtggcttgtctgtgaccacgtttctccttcatttgtcgatttgaatataaccgtatcgcacgtggcgtaaatcgtaccgtttgggcttacatcaaaccaatcgaatcgaattaagtctaaaggatcgggtgcgccaaaatataatggaataagctcccacgaacttccgtaagtctggaatcgatacagataattcatatcccaactgatgtaggtgttgccggatttacgagttcggtacagaaacatacttgagttatttgaaccaaattgaatccaatgttcaccaccattgtttgtataaataggtccatttcgatttgtattagcgatgattcgcgagtttgattcaaaaaagagatcataaacccaactactgtcaagcaagtcgtgagaccacagagtccagcttactccatggtcggttgacctataaaccccgcttctgtatgcatataaatcaccttgaggtgattccgtcatttgacaatcaagcataccagatgcaccagcgctattaagttgcacccaatcattcgaaccgctcatgcatcgatagaatcctgtctgcgctgagtagaaccgattaccgaatgaatcgacaaagaaatgactccacttatctccgtcgggacaagttgctcctcgtgtccaagttattccattatttgaggaacgtacgagtgaattttgtgaaagtgagacaagaaattgattcgaacgaataaaagctgattccggtgataggtcggtacaacgaacccaagaatcaccataattgaagaccatataccaacaaccataactacctacagtaattgtgctatcatttatcattatgccacagtatgcatcgaaataattttgagttgattcagggtaatccttccgttgccacgtcgctccggtatcacgtgatacccataaaccttgatcagtttctatataagttgttcgagccgaaccaaacatgcccactatgaacaccgagtaaatatccgggtaactcggttgaaaatttgtccagtgaacaccgtgatccacggacctataaatgccaaagtaaatgggaactatcagtatgtcatttgttgtcactaaaaaatcttgtggattgtcactcgtagaataaggtaaaatatttgtccaactgacaccaccatttgtcgacttgcgtaactcggttccatgagattcggagtaggtcgccaaatacaaccgattctcattatcggtatgaacataagcaatcgttctgtcagaaataatgcactgaaatagccagctatcgccatggtcaagcgaatagaacagcgtatcacgggaaaaccgaaacaacttgtttcggtcaatccaaaatgcaggataggtatctcgcccgactcgaatgtgaagtgggctccatgtctcaccctgatctgttgtcttgtatatttcgttggattccgcttgtaagtagattacgccactactatccgcaccaagcacccaaactaatccaccatggaacgtcccgaacggttcccatgtcggttgtgcgaatgcgattactgcggtaatcaaaagaagagaaataacgaggaaatttttcattggatacatcgaaaacctcacatcacatacaatcaatttcattacattacaaaataatatagtaatcaacccataatcaagtgtgtttctttatatgcttaaaataaatcgtcatacaatacgccgtcagaattaggataaacaaccaactcaacaccataatcaaccacccaaaatgcgacattattccccctcccctttcgaagaagaatccagcgtaccgtactgtctcccagcaaaatatatcgctaccagtaaaatcaacagcaatccgaccagcccgccacgggtatacagcgtcgctttccacacctgtgaatcacgtatcgatgtcatcataatcatcgaataattttttctcgcccacagtacaatcagtgtaagcaaataaagcggtgtgacatattggataatataaacgaatgatttcggcaccctgataaaactactccgattcaactcctccaacccctgcttcgccccgaatacccacgcaaacatgattacgagcaccaacgcactcaacaccgggaacagtgtccctccccaaaaatcaagttcatccagtgtgccatacgccagtgtcgcttttaccaagagtgaaacaaccagtgtcaatccccccacgatgagtgtcgctttcttccgcgtcaatcccagttcatcttgaataaaagtcaataccggttgtatcaatgcaaccgatgaagtaaacgacgccagcgtcaacagcaaaaaccacgcaaacccgattacgcccggtatgggaagcttattgaaaatgagcggcatcgtaacgaaaccaagattgaatgcaccgctttgcgcgacatcctgcgcccctgccgcaccaagaaaaacgaatgccgccggaataataatcgaaccactcaaaatcacttcgacaaattcattcgttgccgccgatgagagcgctgaatgcgcaatatcgtcattctttttcaagtaactcgagtatgcgagtatcgcccctacacctactgacagcgtgaagaaaatctgtcccgccgccgccacccatacatctacattcaatagtgcatgaaagttcgggttccacaaaaatccaagtccattgacaatattctgttccggaaatgccgggtccggcgtccctaacatgaatacccgcactgtcaaaaatatcgcgagtatcaaaagcaacggcatacaaattttatttaaccgttcgattcccgcaacaattcctctcgacacaatccaataattcgcaataaacgttattccgaaaaacatcaacgcccacggaaatgtccccaactggcgcggtggtaacaatccttgaaattcctgtaggaaatctttcatgtctgccggattggtgatatttcccaaccatccgatgacactaaacgcggcgtatgcgaggcaccacgattcaatgatgaggtagtagaagttgatgacgagtggaacgaataatccgaaaattccagcgtactttgcccacggttttcgtgcaattacatggaacacccccggtgccgacccacgtccgtactgaccgctgaatcgccccagtgtccattcggcaaatgcaatcggtatccctaaaaaaaggaacgcgatgaagtacggcaccatgaaagcaccgccgccattttgtacgacttgagtggggaaccgcaggaaatttccgagacccgcggcgccaccggcgacggccaaaataatgccgatccggcttccccaattctcacgtgttcctgccataaagtaagtttaggtattgggtgtagtgtgaatttatcggttataagataatcaaagatacaacatactggttacaatttccgctacccgttcaatatctgattcgaaaaccccttcgtccgcgcaatggtacggaaatatcgccggttcaatcgcaatcgatggtatcgctcgtcctgtaccttcattcaatattttgccgtattcgagataatcgtttgtattgttcctatgcacaacatctggatacattttcgcgaaccattcttcaatcatagccgttttttctattaattctgttgtcggtgtcagtccattgaattcccaatgccggctatataatgcgacaccccgctcccccttgaaaaacggtgtcgtatccaccgtaatcacgactttcggcaatcgcttcgttttcactaaatttgccgccaaacgtcgcgctcccatcccgtgtgagtacccctcaccattgttcttcaacaaactcggcgcttgtttcagccccgtcccttcttccatttccgagaacaaaaagtacagcgtcggtgtttccatcttcgaacattcttgtatcaaatacaacaacgtccccactccggttgcatcatccaataatcccgtcaacttcccatcttcacgcactaccgagagttcgtctgtcctgtccatcccgaaatgattgattttatccaaatgtgccgttacggcaattgcttctccactcttcttccccggcacggtcaccatcagattattatccgccacaatctccaacttcgcacctggacacttcgccaccgcactcttcaccagtggatgcaatcgctcctcgtaactgctgaacgacgccactttcgccgcttccattacccattcaattagattcatttctattctacttctctttgatgaaaaatttctaaaactttttccgccgtaacttccgccgcatcatccttacctacatccacccactgcactccgtcagtatgcctgaaccaactcatttgccgctttgcatattgtcgcgtcacaatattgattgcgttttccgcttcttccagcgtcacttcatttcgcaagtaagatgccagttcccggtacccgtgaaatttctcccgctcaatcgcttcaccgtaccccgcatgcaccagttcctcaacttcttccacccacccctcttgcaacatggcgtgtgttcgttgtgcgatacgttcaatgacattcggccgttcccgcttcaatcccacatagacaggctcatcaccgaacctttctgaaccctgttcccaccattgcgacagcggtgtacccgatgcataaaaaacttccagtccccgttcgattcgtggatagtcatgcggttgaatttttaccgcgagcgttgggtccagtaaaagcaattcgttatgcaacgccggtacgccgaatttttttgcccgttcccttagttcactgcgatatgcttcattaatcggcgggccttgaaataacccttcgaacaacgcgcgaaaataaagtcccgatcctccgaccaaaacgatattctttccatatttcttcagttcgtttattttcgcacgtgccagctttgcatatgcccccgctgtaaacgggatgttcgcatcctgaaaatcaactaagtgatgcgcaactcgctcattttcttcctgcgtcggttgcgctgttcctatccgaaatccgcgatacacttgccgcgaatctaccgacacaatttccgcatgcaatttttccgcaacacaaattccgactgcggtctttccgctcccggtcggtcccacgatgcacagcagtcgtttcacccgcccgaccgcccaaaacgtcggtctaattcatctatcgtgagttgaattaaaaccggtcttccatgtggacacacgtaaggtaaatcgcaccgaaacaattcttccaataacgtctgcatttccgatattgccaacggcattcccgctttcactgccgctttgcatgcaaatgttgccgctaacctatccatctgttccggtcgcgcttcaaaatctcttcggtacaaatctaaaatctgttttaccatcacttcatcttgcgtaatgtgcttcaatccttgcggtgtgccgctcaaaatcaatgtcgttgcgtcttttactgcgattcgaaatcccaacttcgcaaattcctcaatcaattctcctgctaccgccacatcatccgggcttgccgtaatttctaccgggaacaacaactcctgaactttccacccatctctcgacatctctttcacagcccgttcatacaaaattcgttcgtgcgcgacgtgttgatcgacaatcaccaacccagacggtacttgtacgagtatgtatttcccttgaatctgccacagtgaacttgcttcgcctctctcaaatcccgccgccagctgttgcaacgccgtgtcgtccgccgcactcgccagttccccgccgccccccgtcgcagtatcccaatcccgttttgtttcgagtaatgaatattgcgaagccggacgttctcgataccgtaccggtacatatccctgtggttggtcgaagaaccccgaaggtcgcttcaccggcgcgttcggctcacgtacgacattcggttccgggtaattttccgaaactgtttttgttccggtgtgctcctcttcaaaccggtgggtcggttgttccaacccgccactccgcaaagcatcgcgtaccgcatccaccacaattctgcgaattaacggctcattatcgaactttacttcttctttcgaggggtgaacgttcacatcaaattgtttcggcgtcaactcgataaacagaatgtagaagggaaacatccccggttccgcaatctgtcccaatcctgccgttacggcattcgtgatgaacggtgagcgaatgagccggttattgagaaacaggtgttgatcgccccgttgcatcctgagtaaaggtgccgttccaaccattccggtcaatcgaagtccttgctcttcccaaccgatgggacgcaaatccgccgcgactttttccccgaatacctgtgtaacccgctcttccaatgtaccgggagccagcgtgtagagcacttcatcgtcgttggtaaatttccattctatttcagggcgtgacaacgcgaatcgtttgaaccggacgtgaatgtgtccgaattcggttgcattcgatttgaggaatcgtcgtcgtgcgggaacattataaaacaaatttttaatgctgaatgttgagccgactggcaccgcgatttgttcaattcgtacgacacgcccggcatcgatggcaagataccatcccgtctcttcatctgcggatcgtgacttcacttccactcgtgcgaccgatgcgatggatggcagcgcctccccccggaaaccaagtgtcaacagtgcttcaaggtcttcaaattggcggattttactcgttgcgtgtcgttcgaatgccaataaaagatcttcgcgatccatcccgagtccattgtcgacaacttgaattagattccttcctgcacctcgaatctgaatctcgattcgcgtcgattccgcatcgatagcattttcgacgagttctttcagcaccgatgccgggcgctcgaccacttcaccggcggcgatgcggttcgctacgatttccgacaatacccgaattcgcggcatacatccttccaattattcatcctaatatactacggtcatcgttaaaacagtacgtccgacattcttgtcaggcgattcgtaggacaggcactcttgcctgtccaattagatttgcgaggaatgaaacgaagtatcctgcgaagcagatacgtagtgaaatgacgtgacgatcttttgcttgtagccttttttatagtcatttttgaagcttagtacacccacatcttttaccggtaactggcgaccggcaaccatcttccccctacttcttttttgccgctaccttcagcccctcacgattgagcaatttcaataccccctgctggctcataagtgaattgagatactcatcgctcgctagtcgctttcgccgattctcacttgactcaatcatgatacggtagttatccgtcgtgacatttaatgtcgtctccggtttgatgcccagcatcaacaaaagcgacttatcgagaacgatagcataactaccacctaacttgattaatttcttccgtatcattcccatctcctttgtttttgttcttccctgaactcattgccccattctttttttatcttttccccattccctattacctgttccctatccccccatccttttccgtactctgtcccaaaaaagtttgtgaaaactttttgagagttatccacaatttaatataaaatatatatcttatatatacaatttccaattattgcgagttagtcgcaaccaatttcccttccaaacttttattattcaattctttccattattgcgactccttcgcgcaaaacaaattccccgtttttcgacttctattattttgattattcaacctttctttttttcgtcttttcctaaccgaatcccaaatcctgaatctctaatccaatatccttcctttccccgaccccagtcccctgtcccccgtcccccgtccccaaaatgcccgtggtgctgccacttttatctccccccttccccgattagattgtgttccatacgtaataccagaaactccgggatttcacttgaacacaaaccaatccgaagctatccaaaccattgccgaaccgggcgagcgcattcttgtcctcgatttcggctcgcaatatacccagcttatcgcccgccgaatccgcgaattaggcgttttttccgaaattgttcgccacaattacacccgcgaagagctgtctgcccgccaacccatcggtttggtgctctccggcggccccgcatcggtatatgacaatggtgcgccgttactggatcctagcgtcctcgattgggatatcccgattttgggaatttgttacggcttgcaggcgcttgcccatcagaccggcggtcaggtcgaacccagcgaccatcgtgaatttggtcgcgcttttgtttctgacacccacacctcacggctattgacttcgcttccagccgaatttgaagtatggatgagccatggcgaccgcatcctgcaactccccgatggctacactaccattggtagcagcggcagtaccgcccattgtatcatcgaaaatattgccaaaaaccgctttggtgtgcagttccaccctgaagtaacccacactccgcttggtagcactatcctgcacaatttcttgtatgatatctgccacgcgaaagggaattggacgactgaagcctttatcaataccgctacgcggcatttaaccgaacgaatcggcgataaaaaagttttactcggtctttccggaggtgtcgattcgtcagtcaccgccgcccttctcggtcgtgccatcggtgaccgtctccttccgatttttgtcgataacggcctcttacgcaagaatgaaggggatcaggtcgaggcggcattccgcgatttgggtctgaaaattgagcgcgtaaacgccgaacatgaatttctgagcgagttagcgggagttagcgaaccggaaaagaaacgtaaaattatcggccgtgtcttcatcgagacctttgccaatgctgctaagaagcatgaaggtatcggatggctggcacagggaaccctttaccccgatgtcatcgaaagttcccccgttcgcggcccttccgctaccatcaaatcccatcataacgttggtggtttacccgaaatactaccttttcctttgttagagcccctccgcgagcttttcaaagatgaagtccgaaaagtaggtcgtgcgcttggtttacccgcaaaccttgtcgaccgtcaccccttccccggccccggtctggccgttcgctatcttggtgctgtcgaaaaagaggggcttgacattttgcgcgagtgcgatgctatcttcatcgaagaacttcgtcgcgataaattgtaccacgacgtttcacaggcatttgtcgtactacttccaatccgaagtgtcggtgtacaaggtgattaccgcacctatgagcgggctgttgctatccggagcgtcaacaccaacgactttatgactgccgatttctcgcgtttttcttgggatttccttgcccgtgttgccaatcgcattaccaatgaaatccggcaagtcaatcgtattgtttacgatattacatctaaaccaccggcaacagtggaatgggaatagtttccttgatttatctataaaaaggtgaaaatgagaaaaggtctgagtattggcgttataaccgtgttattgctaccgatttgcattttagccgtcgctggttccccgcaaaccccagtagatactggcattgcggaaccagtctatcaattcacctacctgcaggcattgattctcggtatcgtcgaaggcctgaccgaatttcttcccgtatccagtaccggacaccttgtcctgactgccgattggatgggaatgtcaaaatctgccaaaaatgccgtcgatgattttaacgttatcattcagggtgccgctgtcctcgcaattattggtctgtatcgaaaacgaatcgctgaaatgtggaatggtgtggttcatgccgatccggctggacgtaaactcattttgaacctatttatcagtttttgtcccgcggcatttgtcggtgtattgtttcaccacgctatcaaagagaaattgttcaatccgacctctatcgctggtgcgcttatcgttggcggtatcctgatgattattttggagcgcatccaccgtaaaaaaagtggaacatccggtgttagtgttggtgaagtgacatggaagatggctttgattataggaatagcgcagattgcttcgctttggccaggaacttcccgctctatggctacaattcttggtggcatgcttgccggtttatcgctcgcggcggctgcggaatactcgttcttacttgcactccccgtaatcttagctgcgacagtatttgaattggcaaagagctacaaggaagtcttccatcatgccagtatcggcgttttcactgttggtatggttgccagcgccgtagttgccgcctttgccgtcaaaggttttgtcaaattccttcaacgcggtggtctttctccgttcggttggtatcgaatagcagcaggaatactggtactttggttcgtatcttaatgattactctatattcgtaactttactacacattttcgataatctcactgaaacaatccatgtatagatttattatcacacttctcctcctattcactacgcttttcatcgcaaatgcgcaagaatttaaattcggggatacccatccattcgatgctttaatcggaatcgacggtacaactgattccacgaaaataatttcgttaaacggtgaatggaatattttcggtggctctactccagctaccctccgcgttccgttcagttacaatggaaccgatcccgtcaaaatctcgcggatatttcgtgtaccgtctcgactggctaattatcaatttcgcttaattttcctcggcatcggacaagatgcttccgtcacattaaacggtgagttcttggcgctcggacgtggcgctgatgcgatgtttatcgacattcccccgaatcaactccgttacgataccgacaacactttaagcattgaactgcaagcagaagtgagccggtcagatgagtttcccctcccggctggtttctatacaccaaaacgttactcgggtatatttcgcgacgcgtatcttcttgccctacctttacgccgcatcgaatcttattcggtgaatactgtcgctggaaccggcggtggacgtttgcaattgacttatttaattcgcgattctaaaccattaccttcgtatgcgctacctgccggcacgcccacacaattgcaattacgctggacgctaactcctttctcttccgacgaattgattgcgtcgaatagcatcgacatcgaattaccgcaacgctctatcaaacaaggtactgcgacatatactgttccgaatgtactgtcttggagtccggtacaacccaatctttatcgtttaaatttgcggttatatgaccaagagcaacttcttcatgagattactgaatatgtcggtttccgggacattgaagttacaccttccggtttttttacacactccggtcaaccaataaaaatagtagctgccaattatgtcgaagaatttcccgagacggggtggtcagcaactccctttcaactcgaacgtgacatttttgcagcaaaatcacttggtctgaatacactacgcataatcggaaaacttccccatccttatctaattcacctggctgaccgctatggcttgtatttattggtggaaacaccggtttcgcttcctcctgcccgcatcctacgtggtgaagaatttcgccagtacatcgtctctattttacgtcaattcgcggatcattctggcaaccacccatccatactcggcgttagtcccgggtttggactcccaactgatgatttagatgaagaatacgcagatatctttcaaaaaattcgtcacgaaaccggacatttagtatttctttcaactccaaaaccgctaactacaagaatagccgatttccagatatgggagcgattacccggcctgactgcacagaatctcacgttgccggaaggtgctagtccattgttagcgggtaccataggtattttactcgacccactaacgcaaaaaggaaacgatgctgcttccgaattgcgtcaatccttgtcgttgataaaaacgcttgaccaaactgccgttcattcttgcgctggctttgtgttaggcggtttaaatgactatcaaacccagtatccgcttttaaatcgaacacctgatgaatcaccatacacattaccggttggagtgatttcttatcaacgcaatgaacgtacgacttttgtgacattgcgagattatttaaacggtataccggtcaaacccacaccggtcagtgatgcacccgcctcgagcgcggcaactttcatcgtctctggtttgcttgtgttactgcttttcgcattttccgtcggtcaaaataaagtactgcgaatgcacgtcacacggagtcttttacatccaggtggtttctttactgatgtccgtgatggtcggatattccaatttggtgaaactgtaatcattggtttgttaatttcactaataactgcaacacttggtgctgcaaccatttttgggctacggcacgattactcgttcgatgtatttcttactacacttatcggtaaccccattgttaaagtctgggctaacctgataatctggaatcctgcgatttgtattgcgtttctattagttttctttaccgtaattgcaggcatctttggaattatattatcattcgtttcgatttttacccgtcaaagaattgcacttaccaaagcaatttcatatctcacatggggtttcgctaaccacttactattactaccgcttagtttgattttggtcggacaactttctgcacattctatcagtatcggttggttggtagtggcattcttctttctgctatggggtttgtaccgtgacattaccgctatactaactgcatttagaaattcaacgcgggcggctactttcctattgattgtcgtgttggccggtagcagtataggtgtatggtactggttggtaaaggtaaaagcgattggtatggtatggatgtcgttccgtgccgccggttggtagaaaaagatgcgttccgcatttcggaaatattgtaagaaaaggaaataatatgagcactttacacaaaaaaatcttaggtgaaacacttactttcgacgatgtactccttataccagctaaatcggaagttgtgccgcgggatgtggagctttcgactcgtctaacgaaaaatattcgcctaaaccttccgattgtttccgcagcgatggacacagttactactgctccgttagctatcgctatcgcccgcgagggtggaattggtataattcataaaaatatgaccccgcaggaacaagctgttgaagttgatcgggtgaaacgctcggaatctgcgattgtcgcaaaacctatcacactttcccctgaaaagaccatcgctcaggcacttcagttaatggcggaaaccggtgtatctggcttcccggtcgtcgatcatggcaagttagtcggtatgttgactaatcgtgatttacggtttgaaacacgccttgatgaaaaagtaaagaaggtgatgacacggaaattaattactggtcgtccaggaatgtcgcttgacgacgcagtggaaatcctgcaacaacaccgtgtcgagaaattaccattagtagatgatgaaggtaaactcgttggcttaatcaccgtaaaggacatcctccgaaaacggcaattcccgatagcatgtaaagattcacatggacgtctgcgggtaggtgcggcagtcggcgtcggtgacgctactatcgaacgagcaagcctgcttattgaagcgggttgcgatgtgattattgtcgattctgcacatggacacagcatcggtgtaattaaaacggtcgaatctttacgcgaattgtttccgaaaattgatttagtcgcagggaatgttgttacaaaggaaggggtcgcggacttaatttctgcgggagtggatgcggtaaaaatcggagttggtcccggttcgatttgcaccacgcgtgtcgtcgcaggtgtcggagcagcacagattactgcagtattggaaagtgctgaagaagctgcgaaacataatattccggtaattgcggacggtggcatcaagtactccggtgatatcgcgaaagcgcttgcagcaggtgctgaaacagtcatgattggttctctgtttgccggggtggaagaatcgcccggtgagcatatcctttttgaggggcgttcgtttaaagtgtatcatggtatgggctcattggcggcaatgaagaaaggttcttcggatcgttactttcaacacggcacggaaccggagaaacttgtaccggaaggtatcgaggggcgtgttccttatcgcgggccactggctgacactgtacatcaattgatgggcggacttcgagctgcgatgggatattgcggcacacctacaatacatgacttaattacgaatgctaaatttgttcggattaccagtgccggcctgcgtgagtcacatccacacgacattatcattacgaaagaagcaccgaactactctgtaaattcgaataatgattagtggagatacagttttcaactcaattatacacataagggatgctgataaatatcggttattccgaatcttatcagagcgtagtgatagaagctagtttcgggttcaattttggccgagttgcgtaattgacttgaacggtctatattaacggctggtctcactaatgagaccttggcgcggggtggagcagtctggtagctcgttgggctcataacccaaaggtcgtaggttcaaatcctacccccgctaccataattaaagaagacataaggtatttaccttgtgtctttttttatgccctcgcctctcggttccggtcaaaagtgacgaaaatcatagggtcgatatggacagaaaagatgacagaaaaaatgtattcagaaccggtgcatcgcgctcgattttgtgacgaatgtcataacctcgcagtagacaaaaatacaacccgcgccgggactgggtttcaagatatcatcttctcagaaaaagccgccaattccacactcagtgtaaaaagagttgtgtcacctcagccagttgtcctttgattttggggatcgtacttcgcagatcaaaaaatagaggcaggttttcgtctatccagaattaatatgacgtttttacttaacaattcagcctagatttgcttgacattacattcacaagagtttatattttgtaaagcttaatattctcgaaaatcattctttccttcaagtggaagacaaattgatggttatctgcggtaaatattctgcagttgtatgtgttgtccttcttttcgtcgcactaattcctacggcgcaagctcaaactttactctccggttccttatctggaacattaacccgaatcggtaatccttatatcgttaccgacagctgttgggttgccaccgattcgcaattgacgcttcaagcaggcgtcaacattctttttcgccgaaacatgataattacaattaacggcacactccaagttctcggcacacttggtgattcagttttctttgcaccggagtcggcaaatgtgcaatggtggtgtttgaattttcattctggtactcatcttcctactatacgatatgcctcgttcatcggcgcacaatatgggatttatgcggtcaactcaccgattgatttacatcactgctttttcgacaacaattgttccttcgcaagtcatagtagttcgattacagcggattcttgttggtttatcgacaatgtaagtagttactgtgatggcagcggaacgctcacaaactgtcggattgaaagtttggatggcgttcaattctttggtacaggtacatacacgaactgtctctttgtatatgggaattcagttagtggtaaccccacggtaatgacagatgtacattttgccgctggtggtaatcttggcggcgagagtgtatcggtttctcttacccgcgtaaccggccatccttcggtacggatcgccgatgcgaatggtggacatagcagcacctttattgattgccaattgcgtcaactttggtacgagggttctggcagtacgattactgtgaatcactgtgttttggattcttggttatatgttgcagtatggccgtcaaatggcaacggtcttactgttcagattgattcgacaagggggccgacgcttgaattgattctcatcaataactcgcaggcaaccattcggaattccgttttttataaccaaactcccacatccgatgtttctccttttgcttgtcttcagtttagcaacacacaagcccttatcgaccgctgtacaattgttcagcgccagtggttttttccccgcgatacagcattgatccaaattggcgaaggaaatactcgtccggtaaccatccaaaacagcgtgctctatcacgccactcatcctattattgttcggggaaatggcgcttcaccaccgattctacgttataatgcatttcaatctccacgtccgttttacaatgttacagcagacagtacgaatcgaatcggatggctacgattacaaaacataagttctggaaacgattcactacgactctattcgatagcaattgatggtgcagatcctttattaccacatgatgccgacagcagttgcgccgactgcggtgcgataccgttcgaccatcgcgcgattcatccaattgaggcatggcaggatacaacaagaagacaatcctgggtattcacttccgatacgcttaaaaattatgtcgtgacactatgggataccttaccgagtgtttcagtacaggtacttccgacattgggtccaacaccgctcgtcaatttccggcaaccagttcggagttgggatacattgcaaatagctctgcatgcaaatggcgattcattagcaagtggaacataccgtatgattgttgcgaacggagtgacaatgccggatacggtatcgatcggttaccggttctatccgagtttaccgtcgatactgcatgatacagtactcaccagagcacacagtccttattggatttgtcgtccggtaacaattccgcgcggtgataccgttaaaatagattctggcgtcacggtgtatcatacgttaacacccgggacacaaccggtatggcaagtatacgggacgcttcaaatcaacggaacacccaatgacagtgttcgttttcaacaggtgtttccgtttgatgctcatgcttggattggaagtatggttgtcgattcagggggaagtttactcgcggattattggaatttggatacgacagaaggattttacttgacgaagagaggtaatggcagtttagttttgcgaagttcgagactaccggttctgttattactttctacgaaaggcacaaatttacttcgtagttcagagttctttagatacccttattacacttatggtggcatcgaattctttgcagattcggattcagttgcaataataagtacaaaattccattttcgttgttttttagaaatatacgatttctaccatcatgcttcttacttaattgatagttgtatgtttatgaatgctggtattgagcttgatgattcggttaaggtaacccattcggtattttacaactcttttcaaacttatgatggaagcgttaccatacaactaaaacgaaacttgctgataggtgctcaatccgtcatcacgaaaaccgtgaattctatacccagtcccctcccacctgtgacagttgtgaattctttattcttgaatactatacgacctttacgtcagtacaataatgctgtaccacaatacgatgttcgcggttgcctgttttggcagtgcgacacaaatcaattacaagatgtacgcttcgggcaactcacaagaattaatcggaatggcgattcaactgactttttcggaaacctctttcagaatcctctgttcaccgattccacaaccatcccttggcagttcgctctccattcaccgattcgaaatggtggtgtttttgatagcttgccctaccttggctccgctcctgatatcggaccgtgggaaattgatacgtctgtctcagcagtaaaagaaaccgtaacagctttaccgacaactttttcggttgggaagccctatcccaatccgaccaacgggatgttcaaggttacgattcaaagcccacgtgcaaatggtatggaattgactttttacaattgtcttggacaaacgattcttcaccagtttttgcatgttatcgccggtaaaaactcttttacaatccggtgcccagacaccctgccgaccggattatactttgtacaggttggcggggagaatgcacgatttccgattttgttgctcaaatgagcatgaggaggattcgatgtctcgtttttcaactttttccgtagttctttatttgatgctttgtgtagtatttcacagcgcttacgcccaaccaatctcatttttgcgtgcaaatgtcgacatgacagcgcgaacattagtgccagacagtatatatgtgattgtcggagatagtagaaaccccgatacaatcaaggtaactagcactttgacgattcaggcaggtgtcaagattctgtgtgatacaagcactctggttaatcaaacaaattcactaagaaagaaaaaagtgattttgatcagcgacggcggtagcattcatgctaatggaacttcatcatcgcctattctcttcaacggaattattgatagtcgccgttacgcacacatgattcaattcaatttcgatcatccgcacgcatccagctggctccagcactgctatatttatagccatgattcactaaatgtatatccaagtacgttcgattcgaacatcgtcatccgggtaaaagcgaacctagatactgcaattctgcatttgaataactgtagcatcaattatccggatgattatttgatctatccgaatttgaacaatctaccgtccgctaaaacactcattttattggattcgacaaagaatgttgtaatcgattcctgctccttttttggtaacaacggtccctacacgccaggggatcaaacagtggcgattcattcaaccacttcaagaaatgctcttatttcgaattcacagtttttgtcgtgcaatgtcatgtgttcaggtgacagatcgggtcagttcctcttgaattccataagcaaccctgaatatatcgttacttatccactcgtgcttgcgaactctcagttaatgacaattaccgaaaataatatagcaaacttcgattcattcggcatttcgatcgttcattgtgacagcattttcatgagctttgatagtattgttactgcaccatccgacatcacctcgcttgtaggagtctttattgacagctcgcaacattgttacgacagttcttcatttgttgcgtttgttcaacaagatggatggtcggttaatcgtacgaattcgagtcgattctcgaattgttatgcaacctgttgttcgcaggcagattacggcgattcgaccaatggttatgctggatttcattttcgaatggttcataatttattaatcgactcgtgtacatcaacgtgtaacgggcatgggtattcacctgaaagccataaaccatctaacggatacggttggggtatgatctttttctgcgatacagtcaacaacgcacaacacgatacactcacacccaatgataatacatttttctccgttgccgtatctcgaagttatatttacaaaaatcctaatgcgagcgccgatgtttcgatcaattgtgacagtggcgtggtactacagggtttgaaaggcggaggtatctgggtacaaaatcactcgcgtatttcaattgatacttgtcatattcgatacaatgctatcggcatcaaggtctcgacaggtgcgtcaccgctggtgcgcgattgcctaattgattcaaatttcatgttacatcgtattccgggtaacgatggcaaaactacaatccagtcttcaccaggtctctttttcgacaatcatccgtatgggtcttatctccgcaatcgaatatataataattctattggtatagttgctttaggtggtgatagttatagtaaccctgactcgctaacgaattgcaatttgccttgggtatggaattgtgtgattgatcgctccgagttatcgggagttacatcgagatctggtggaattcgtctcagcaattcaattctgtatcacaactatttgtcagcagatatgctcgccgattccgcgcatgcaactgtattaattgatacccctacagttgctaatcaatttgtaactgataactgtgtgtatgtccggaatcgaaacggtgaattcgatttgaaatgcttaggtggtgttaatcaatttcaggttcgatacacctattatcaacagaaagacaatctgcattttaatcagattccgggtggtactggtgcacgaatcagtagtcctgagtttatgaatccactctgttggaattggcatgattttgttcttaccgcaaattcacctggtatcgatcaaggcgattctttaacgtttttccatgatctatatcctgaaacgaataatcccaggaatgatcttggttgctgtggtgggccgaatgcaaaactgaattgtggcggcccttctgacatagtcggaggaagcccatttattacagttatttccgggcaaattacgcacgatacaacgattacaagagatgtacatgttaatggtgatcttttcatttataacaatgccagattgactattctttctggtgttcatgtgtttctcgatcaagggcactcggttactgtcaaaggtggaattatctgcaatggcagtacgtatggtaaaatctttttcgatgtatatcacttaaatgactggtcgggcgaatactggcaagggatcatattttctggaaatttcgatgcacaacattctatttttggacatgtagtaattcgccatgcactcacaggaatggaattcgattggttaagcggaccatacggtatttctcccaattttgtcacaattagtgatggcgaaatgggagtcgtagtatatgggagttatgtttcaatgaaatctgatactattcgaaatatgatcttccatgggtgtcagatttacaatggggctttcgacttaacgaattcatgtatcgaaaactgtggtggatacgggttatacatatatgtatgcaaccccttattgatgaacaatgtgattcgtaataatgggtctttgggttttcctggggtttactgtcttggcgcgtcccccgatattcgcaagagtggatcttctgtcaacatcttcatgaacaacgggccaacaaccggttctccttacaatcaggcagaactgctcttaaccggagaatcgtacccgctcatgaaggaaagtcatgcggatatttacgataaacgcacacctggtcagccttatgattgcaggtttgcggtattcaataattcggcaaagatatccgtgtgtaataactatttcggttccgacgttcaaacagttaccgatgagaaaaaccacaccacgtatgatacattggttaattggggtgtacccgataccttaccaaatcgaattttggatgtcaatgagttgatgaatgcattagcacttaaagactccggacgttttatcgaggcaattccaattttccaatcaataatttcagaatatgctgattctgctgatggttactttgcaatcggtcaactctgtgaatgttggaatcaaactgggttatcacaggatagtttacgacaatggttactaacggagtctattttacatagttcggcatatcgacgagttctcgaacgaaatgctagttggtgtctcgactatacacgctcgtatgatagtgctttaagggaattcgatagcgctcgcgtacaggcaccacgcttaacagattcagtagttgctgttctcaacattgaattaacgaatattttgcgaggtatgcgttctggtggcaataccacacagagtttaggtaattcaagtgaacgacttgaaacatatcgcgagcatgttcttcaattaacacagctgattaatcagcggtcgtatcagtcgatgcacaaacaagacccgacgctcccgaccgagttttcattggcaaaaccatatcccaatccattcaactcgacaacaagaattaaattcagtgttccagttaatcaccacgttgttttggaagtgtatgatcgtcttgggcgtgaggtagctacgattgcaaacaaggatttccaagcaggcaagtatcttatagactgggatggaaaaaactcaagcggacagaaagtcagttccggtgtgtactttatacacatgaatgcagggatgttttcggccacgcaaaagtcagtaatggtaaagtaagtaatcggaacaatatatttgaccgcctcacagcccgtggggcggtttctttatacattcccaataaccgtttctactacactctccatacccgctgtctctttcaacccgggtatcagtacaaaatcggcggtgaatgaggaactcaccggatcactctgaatcttttccacgaacgcccgaataaacaatcgcttctcctcgattgttcccgactcgaatacttgcttgaaattcttcgccagctcgattgcctgctcgatgacgcgtcccgcttcaatccggttactcccggcggaggcaagttctaattgcttcgactcgagtaccgccagctcccgttttaattcaagcaatcggacgtcgacgtaatcccggttagccgaggtaagattatcgatgagattatttgttgtcgtttttatctcacgaatacggttgtgaacctgatcgatttcgtcgccgagttgtggtgtcatctcaatcgcgatacgctcgaccatgctccgcagattttggatgccctccggtgtacaaaaatgtttctggagcatcgcgtcgattttctcaaccacccattgctccaatttttctttcccgattaaatgccgtttacatactttctgccccttggtcacgtatccattacaacagtaatacagagtcttgacattcgatccatcgagtcgtttgcgtcctttctgaatggtgtatccgatccaattgtgaccgcattgttcgcaatgtatcatgccggtgagtaaaaatggcgaacgtgctccgcgaccgcagttgtatgtattgccatttccattcttggaagtgtattcgcgacgtttctgggattcatcgtatcgggtccgggtgataattgccggatgcgcatcgcgtgtcacgatccaatcttcctccccattcttcaaaggagagtgtcccggaaaattacggatcggaatggcggcatgatttgagatacggtggaacttggcgaacgatgtgcggttccacaccatatcgccggtgtagatcgggtttttcagaatcaccgcgatagacgattgtccccatccgtctttaaaattcggagcacgaaaattaccaaacggtcggtcggtctcttgctggttgagacgctttgcgatacctttgaacccgataccatcgacgacataccaatcgtacatcgttttcacaagttgaatccgctcaggtgaactcaaaactaatcgagaacggtcacgcttggtaaattggagtgagtctcctttcggaaccgcacgaaccaattctccctgctcgtttaatatgctacgcgaaccatcggacataaaccgcacagtacagaggtactcgttggtgcgagaataatacgccagatcgtaaccgaatggtggaactccaccgagccaccacccaccttcggcgcgagtcaataatccgcgtatcgttactttcgacaggtctttcaactcttgccgggcttgccattgcttgaccggacgcagtaaatcgtcggtatcgtcaccgttgaatccctccgacacatatatgatctcgataccacgtgttttcagttgatgccggtagtatcccgcctcgtcattatcgactcttccaaaccgctttatatcgtacacgaggacctgcttgaacggacacgatttcagtttcgcgtccgcgatcaatttcaagaatgctgttcgtccatcggtcgatgctccgctaatcgcatcgtcggtgtagaagttcaatatctcaatcccatgattgagagcgtaaccttcgatggtgcggcgttgatctccgatggattgttcctgccgatcggtggaacgtctcaagtatcccaccgccggatgatagttgttattactcagaaccattatcgtactcctccagttgaatcgttattgagtgctggaagggtgcaatcaaggggtgtcgaagtcaaggcggggtcgggcgctccggctgccggaggattgcgtgcgcctgcattagactgtcgctgtaacgctgtagacaatgaccattttgccaacactcgaaacgcgagatgctgacgttccatttcctcttcgttcggagtgcgatacatcgcaatgagttttatctcggtctgttgtattccgtgtgcagttaatgtttttgaatttttcattacctttttccgatcaatcaatactgcactctattaaggcaaccggcgtgccagttttttttatgacagaattgatgtaatcagaaacggtaagtagcgaggaaatcaagaggaggtattactgcggaaaacaaaacgagttatccaccgcttaaaataggcggtcgcaaagccaagccctgtctgacgaccgttcaaaatgagcgctgaattttggtaaaaacgttcattttcggcggtcgttctgtaatcagtaacacttcatagcggtgaaaaaaatatccaccgcctaaaataagcggtctctaactcaatgcctgcttgacagtgcctaaaatgagcggtggataaacccctaaaaacgagcaaaataggcgctccggttcatagcgggttatgatattcctcacattaacgactcccggaaaccagcaccattagcatcttccagtacttacaacattccggacaatcttggcacgatgattgcgtttagtcgtttcggacacttgcgatgaatcaattcttacgtcgcagacaaatagggaaatcgaaatgtgctggtgcaatggagtggacgaaaagtttgaacagactaagcgactgatccaaatccgcgatatggctgcggagcagattcgtgaattggaatcaattcgtcggacccgcgacctcgtccttgcggaacggttacgactggaacgtctgcaacgcgagcatgatcgtattcaaaccgccatcacagaaattaaaatggaaagcagtaaaaaatgagtctatccaattctcacatatctgaagataccgatgaaaaggaacttgctccgtcgcggatcgggcagggtgtttcgaatgagtgagctaaaaccgaatgtgcaattgacggcaacgatttgtatcgaattgacgccggaggaagcagatgcattgctactgattctgaatgcgtaccgcgaacaactgccgttaccagtcgatgacgatttgtaccgcgaactgatccgaaaattgggaactattcatgaagcaaggcaaaatcatgcgtgaccattgtgtcgaattattgcagcattatttcttctcgcgcaccgacaaagtggcgtttcgcaatggctctggcaaaccgaatccggcgctcgccggtgagttgctccccgcgcttctggcggcacatgttcgcggtaaggaacttccgaaagtaactatcgaatcgatccacagccgggggacaacgaaagttactggacactttcgcattggttcctacacaccaaatgccgaaggattaacgaaatggctttgcatcgatttcgatggcggaccggaacatcccaatggactggtcgatcccaaacaagcagtattattgtcacagcgatgcgcaaacgattttgggattccttcttacatcgaacgctcgggtggtggtcaagggtggcacctgtgggttttattcgaaccaatggttccggcatttatggcaagacaactgggtctggcgctttacccggaagatgcacgactcgctaacggcgaatctgccgatgctaaagtgaatcgcggcatcgaggtatttccgaaacaagcaacaatcaaacccgaaggctatggcaatttgctatggctcccatggtggcatcaagcagcgcctggtggtaacgaattttatatcgcatccatgttgggaaaactcgatccatttctaccggaacaattcgataccgtttccccgaaacagttggaacagacattaacggcacaccatcgcaattcaccagaattggcacccacccgtcggaacaccgcaacgacaccgtcgccacacccgacaaagaccaccacatcggaatgggacgaatggcgaactactgcactagagaaactcacactgaccgatgtttatggtgatttattgactggcagtcaatccggtgcggaatggttggaatgccgcgacccggcttcccccaccggcgaccgcaatccatcggcgggagtggcgaccggcaccggtactatcgagcgtggatcgtttcattcctttctcaccggtgaaacgatctcggtcttcgatttccttattcggattggtaaagcgaaacatttccgcgattcctgccaatggatttcccggcaaacaggtataccgctaccaacgcggcaagcgaccacagaacctgcaaatgatttgccggaaattgtcgtcaacaaccggcaactttctgtgatcttgtccgatgcttgggacgcactcattgctgcgaatcaaccaccgcgcgtttttcggcgaacgaatcacctcatccgcatcaaaatcaatactaccgaagacaaagcttatccacaaatcctcgatgatgtcgatatcttcggtctgctattccggtgtgcccgttgggttcgtatgaccgaaaccggaatctccgacagccaaccaccgcacgacattgcgcgcgacattacgcgggaaatcgatgagcgcattccgtggttcgacgatattgtccagaccccggtctttgccgccaatggtattttactcaatacccccggttattatccggaggaacatctctatgttcacctcccggacaatctcaccggaattgctgtgccatcgcatccctctccgaaagaaattaaatcggcgcgcgattatttactggatgagttactggtcgattttccgtttgttactgacagcgaccgcgcgcatgcggtagcggcattgttccaaccattcatccgacccttgatacaaggttgttcgccactccatttgatcgaatcgccggtgcccggttcgggtaaagggctgctttgtaacattatttccctcattgccaccggcagtattaccggtgcccgcacaatacctaatgacgaagacgagttccgcaaagcgatcactgccgaattgctgaaagacgattccataatcttactcgataatattaacgagcagcgctcactcaacagtaccaatctggcaacagttttgacctcaacggtttggtctgaccgcttactaggggcaaccactaaaatatcgattcgcaatcatgcactctggcttatgaccggcaacaatctgaagatgtcgctggatttaatccggcggatggtgcgctgccggatcgatcctcacctcgagcaaccgtggctgagggagaaatttaaacatgccgatttgccgctatgggtacgcaaacagcgacgcgaattggtgcacgcaatcctagtactcattcaggcatgggtcgatgcgggcatgccgccctataccaaaccgctcggttcgttcgagcattggtcgcaaatgatcggtggcattctcgatgtggttgggatacccggttttctcggtaatctgcagtcgcaatacgaatctgccgatcccgaccatgcgatctggcgagaatttgtctcggcatggtgggaaaagtaccgggaaaaaccagtcaagatttccgagttgaatgaattctgcgaaacgaatgaattgctcgctgccttgcgcagcgacggtacgacccgctcgcaacagaccaagctgggacatgccctgcgcagaatggtcgaccgcaacttcgccggttaccgcatccggcaggcgaccgaaggggtgagtcagagccgctacaatttttatttcctcacgccggagaatgcatgaaccagcgcactcaaccgtttgtgcggcagaccttgaacgcaggtaaatgcttgtcattccgtcaaggtctgcagatgtatgcagcaaggtctgcacaccggaatccttactggatgcgcttttccggtcgtatgcagacctcagcagacctcgattgtacccctcctgcgagcgtgcgtgcctgtgcccgcgcgggtgagaacaggttatacgataaggtgtgcagaggtctgctcgccatcgcaacgtccgattcctacagcgaatgcgagtacagacctcaggttataaggtctgaatcaggtacgaaaaggtctgaagagaataacaaaaagaatttcattcaccaccatgattcgaatggaaaccggtaatgaagaaatccaataatgacagtacttccagtaaaaagcaccgcgtcaaggcgcgctcgctaactgcgctggttccagatacgcaagaacgctcaggtgttacaggtactctgaatggtaataccgtctgtggtgtcgtcacgaagaaaggaactcaatgccgacaaccagcacaggcgaatggcaggtgccggtttcatggtggcaaatacgaaggcgcgatcatggcgcgtccgggaaatcgcaatgctgttattcatggtgcgtatttaccggagctacaggatgagcgcgaaaagaaagcgttcgatttgttccttgccgatttgtacgaggtcttccccgatctgaataaggcgagcgacctgcggcatgcgcaacttgccgcgattacctatatccgtttgctgcgtgcgttgtggggcgatgcttccagttcgactatcgacgatctatcacgcgcgttcacgcggcaccttgcggcaatccgtgtaaaccgtgaccaacgggtggttgatggcgagggtgcggcaggtccgaaatcacctgccgagtatgcggtcgagattattcagcaagtacggatgtactcgaaaggcggcaaagttccagtgccaatcgatccggctctgatcggtttaggtccatcggcggagatactacccgatgaatagtaggaacatgccggaaaattttcgcaaaccatcgcagagggtcgcagtgtcggtgcgaaaacacaagagttacaacgacgcagtgccgaactcaatcgcagagtcactattctacgggcattgggagctggtgagaacctggcagtgtcgcgggtgttagtctgaacatggtctgtgcaatgacaggtagagaaagccaagagttaggcgaatttccgaatcagtgtctcggaaattctggtgcgcaccacaggtgtgtgttggatcatgttctgacgtcattccgcctaactatcgaagaaaccaaacgtatggaaaaatgctgcacatgttcttccgatctgttaggaccgttgtcgtcaccgcatgtcgagttgggtgcgagtgcgcaggagaaagtcgtgttaggtgattcatttatgacttttttcaacacccacacccatacaggcaatctcggttctccgacgtcaccaccgatcgaaccaatgagcgactcgctgttatcgcaggtcgctaagacggagtgattcattgtcttgttgtcgctttagacaatggtgtaataaacaccacgtccttttccgtgcggtatcagttgtccgctacgaacgagggcttccaaatgctttttgatcgtgttgcggttgaaccggtaatggctgacaacatccgacatcgtaatacgaccacgctctttgactaggcggataattgcttcgggaatcggtaacgactgttgctcgcgttgcgattcgacccgctcgagtaaacgatccttttgccgcttgagtgtgagcaggaagaactcattccaagcgggatcgcagaggtctaattgggtctttcgtagcgccagataatagtcctgcttttgcagttcaatttgttgttcgagtgaactgtactggacatagtcgtatccggcacgcaacaacaataggttggtaagcacgcgcgagacgcgtccattgccatcttgaaagggatgaatggcgagaaaacgaaccgtgaactcggagattgtcaataacgggtgttccgattctgcccttaagcgttgtccgatatcggcaattagttcgcgcatcaaatgcggagtttccaacggtgaagatgtttcgaaaatcacaccgacttcgtgaccggtttcgtcgaatgccgagacatggttgggatgctgtttgtattcgccgagatgccactgatccttgctggaatgcgcaagcaaaattttatgcaattgcttcacgtggttttcggtcaagtcgatttcagcaaacgactcggttatcaatcgcatcgcatcagcgtatccggcgacttcttcttcgtcacggttgcggaaagaatgaatatcgatgccgcgcaggagcatttccacttctgaattggaaagttttgccccttcgattcgcgtcgaagaaccaatcgattcgatggttgcaaacatccggagggttcgcagcgcatcggtcgataatgaagaaactccgcgccagtaacccttgaactcatcgatttcagcgatgagtcggacaatctggggagtgagtgtgatagacatgggtaatccaatttgatacacaattatatccaattatacccaataagtaccgcgactgcaaatttaatgggtctatatgggtaacaatgggtatagcaataatgtaggattttttatgtttgagcatctcggcaccgatttagcattcgataatgatggcgaccttgtcgtttcggcgactggagattttgccctcgtaaccggacgcgactgtctgctccacgatctcgccgatgcattgcgcaccctaccgggagaactatttccgcatcctgaatacggttgcggattgcttggtatgctaggatgcaacgacactccgctcaaccgggcactggcacagcgctatatcacacagaccatcgagcgcgatccccgcgttgttgcctcgacgattcgggtggaagcgatctcgtttgaaagtattgagaaatcgtttcgggcaagttttcaagcggtcggtgacgaagacacccatacactcgtttggggttatggaataaagagtatcgatgatttgaaacggaatgcaacaaagtgaaatcgtacactgacattcgcgatgaattgattgaacgggttgcaagtaaaacaccattcaccaatttctcgacctcgagcggaatccgcaatctgctggagattttcgcgtatgtcatcgcatcgctgtacaactttgtattcaaggtggcacaacagggctttctgatgagcgccaccggtgaatggctcgacctgcgcgcacgcgagtgcggagtcgaacggttgcccggcaataaagcgcaactctggatcacattcaatcggacggcatcagcaaatcccttgacgattccggcaggtaatattgtcaaaagccgagctgattcatccggtaatgaataccggttttcgacgatacaaccggcgacaattcctgcaaatgaatcattcgttcgggtgctggcggaagcggaagcgattggcactgcttacaacattggtagtggaacggttacgcgactggtgacatcgatctccggaattaccagtgtcatcaatgacgattttttactcgcaaatgggaaaacggtatcaaccctctatcgcgaggggagtgacatcgagactgatggtgcattgcgcaagcgtgcccaacttgcgtggcaggcaatcggtgtcggtggtaaccgtgccgcctacgagcaatgggcattgtcagtcccgggtgttcggtcggtacagatcctcgatgattttccctttggacccgggacggttggagttgtggtcttgggtgtcgatggcatgccatcatcgcaattgttgtcggatgtattgctctatctgcggcaacgtaaaccactcactagtgacgtacgggtcgtgggtcccagcaagcgcaccatcgacgtatcggtcaatgtatggcgcttctctgatgccgatcgtgaaaccatcgataatacagcgcgtcaagtgattcaaattcacactgacaaattgctgttgggtgagggattgttagttgcgcgcttgctgcaagcgattctgaatatcgatggcgtgtacaacgtccgattactcttgcctgcgcaggatctgctctgtggtcccactgaatttttggaactgggagcgcttactatcgagcatttcctcaagggacgcagttaccaggacactggtatcattatcgaaccagtcgagaccaccgatggcgaatccgttccggcactcaagcgggagaatttctactgatgagtgtgatcggcgatttcctctggatgctgttgcccggtatccgcaaacaaaaggacacagaaaatagtgctttgtacgggttactctcggcgattggagaagtgctcgacgatgcgaaaagcgatatccgcagaattcggttgtcatggtatgcgcaggtagtggagccggacgatggttattacgcattgccggaacgtaatagcgatctcgataccattgccctcggacgcgggactcgccgttatccggtagaatcgaatgagtcactggctcttcggctcaccgattggccgaatacctgccggtggattggcaccaagccgggattaaaggcattaattgaatcgcacggttttgtctgccgggagatcgtcgaaagttatgccgacccgcagggaatgattttgctgtctattaacgatcaaccgctggaagcggaaatcaatctgacgcatctcttttccgaagaggatgccggtaaaaccgactatgtcgaataccgccagaatcgggtctaccgtgccagtgagctggtctggaatttctgctttacggtgagtattggcagcaatggactgccggaacaccggcgcgagcaattgcaacaagcgatatatgactttaaacccgcgcacacccaaacgcaaatattattcgtggactaagaaaagcaaatgaagaaactactatacttctccggtataaagccgaccatcgaagacctcgagtaccagcaagacgggattgaggaagcgctgtcgtccatgcaatccgatctggtgagtgatggtgtggtgcggggattgcttgtttccaagggaatccaagactacctctgcgcatccggtgtcgcttatatcagttgcaaacggattgaattaatagaaacgacatcctttcaatcgacagcgaatcgttatgtctttttacaatacacgacaatatcaagtcacgaagtatcgcactttctgactggcgacaaatacaacatctatggcgacgactcctttagtattgtatcacgcaccgacaacaccccgcaatccggtgaggtactgctcgcccacattgaaaccgatggttcggttaccgatctgcgggagccagtttcgctattgatcgatgaacggttgcatgcaccgaacaccgatacccatacaactgcttcggaatttcgcatcggaggtgccgatggacctgtcggccttaccgtggaaaatattctctcagtttatcccgagctaaggaatttattacgtaacggactgatcaacttccaagatggcaatggtgaccagttgctactcacccgcaagattccttcgcaaccaaacgcaccggtgctttcgctttcgaatgctcaactgaaactgtacccgaccagtcaacgatcaagtgaactatcgctggcactcgattcgtatcaagcggcatcaatagcgagtcagcaaatatcggcgcacttatcgtcgctgcaggaactgcgcgcgctggtcattgccaaacaaatcgcaggttatactttcgagcaactgcgcggcaataccgctttgcccggtggctcctttgattttgaagtgcgcaataccaagaatgacttgattcgcaacggtgtgttatcgaatatgcgcctaccgggaacggtttctctctcaagcggttcacaggcgatggttggcaacggcaccagtttcgatagttcctatatcggcaagcgaaccctaatcgatccgggggcgaatagttccccactcgaatttactatttcggcagtcactgatagcactcatgccacactttccactacggcaaccggcaatattgccaatgcagtgttttatttttccgatgtcccggagatcggttttggtggttcgattacaaccattaccggaatgctggctggcatcgatgcggttaaatccggcaaggagcaaaaccgttcgctggcgctccaacaacagacccactctaccaatctgatcggcgatagtgccgcagttatctcccaaccgcaaagcaaccagtatgtattattttttagttggacaaaaccgttactgttcgaccacgaagagatcgtgcaatatctcgttcgtgtctatgaattgttgcccaataccggatcgctaccggtcgatatatcagttgctgtgctcgaagcaaatcacaccgatgccatcgttcgtgtaaatgaatcaccaactaaacagcgccgccagatcgaaaccgacgatgcgaccacaacggttgggaatggctccactacgagtgaaatcatctataccggcactatgtcttttcaaccgaatcaacgaatcatcgtcggtaacgaaagcggaatagttcgcactgtcgatcccggcaccaagaccataacgctgttatcaccacttaccaatgctcccatctccggcaccacactcaccggtaagaaactactctatgaatccgatgtccgcaccgagtcgttctccatcgaagtaaacccgggacaacgattgctactgttcgttcggtcaatgtccgagtacaatgtcgtgagcaactggagcaatagtctcgccattaccgtcgatgcgctccagagtggcgatggcaagacggtagcacagcttgccgatgctgatcgcaaagcgatgacgaccatcaaacagatcgagcgtgagcaagtaacgcgtgatttatccgaacaggtctttactctccaacgcgccattgccgaagccccgactcaagagcaattagatgcgctggcggcagctatgccaacgggagcgaactaatggcagaccggatattgacattaagtggtcttcccgtgggcagaagcgcagtgttgtatgacctgctggcaagagtgcaacgcgatgggaaatggtgctcgctgccggtgcgggtagtgacagtggcaaccgatggcacactcaccatcaccggactgcgcgacagtcgctatgcattgctctttaccgctcctgcgctggtcgtgttttcgcgttatcgaatcgaagttggcgagcccggaaattatcgcacccgctatctcggcgatgcggtggagacacctttgttaacacaggtatcgtcagtggtagcgaataatgagattggtctgcaattcaagtggtcgctgcgcaacgattacggcgtcactcattatgaattgtatgccgagcgtcaagatgtcgatgcggctggtgtgccagtaattatcccgggacgtaatgcacgttccggtattcttcccgcagttcaaccggagacacagtacgaatgttacctcgttgcctgcggactgcgattgaaaagtaaaccttcacaccgcatttcagtgacaactccgcagtgcccaatagcggaaccaaatttaattattaatggcaattttgaacaaatggtctggtgaaaggataacctgacatggcaaatcaaatcacaatttcaacaactgaaaagttattcggcacccaatcgatggagattactaccgatagtgcgatggcttcattgctcaccgatccggataaaaccaattttgtaaatgtcaccggactctcggcagtcactgtctcgtgctatctctatatcaagacctacactgccggatacatcgtagcgcgcaccctgttttatgatgtgaatggtaatttgctcggtaaccatgactgggttttacaatcggcgattaatgccggattcacccgtttctaccagacctaccggttggatcaatctccggttccaaccggaacggttaagctgaaactgcaattcggtggtattcagaagtcgagtgcgaatccgaacttcgatctatttattgatggtgtgaaagcggagcagggggacaaactcactgccttctccgactatactctaaaggagaacgattcgctcgatctggtcggtgacggtgtcgtcttcaagaaggttgctggtgtcaataccgaccaccggatcacgagtgactctattgagtccgcagccgtgaccacaactaaactggcggatagtgcagtcgatgccaccaagctcgccaatggcgcagtcgataataccaaacttgcggataatgcggtcaccagtatcaaaattcaagacggtacgattacaaatgctaaagttgcagaaagcacccttactgaagaccggctaaacagcggcatggtcacgaaactttcgaaattgaagtcggatggtgatttccaaggtgacctcttcgcttccgatggcactaccaagctcattgattccgcttctggcaaggtaaccacagcactccagaccagtagtggcgcttccatcgacgaccggatcgaacaattctacaccgatatctataataaggatatcgcgattcccctgctcgataaagatgtaaccaaatccgcagtccatccgacttacttgacctaccgtcccggttttactaccggagatatcaatatcggtaacatcggcgatagttgggacagtatgttcgatctgacgcgcgccgataatggtgaggatttacttgatgcttccggcaatccgattaaggtggtcgcgctctggcagaaacagaataagaccaatgcgataactgccgggagtgatccgcacgggtcgggtcccggttggtcccgcaacgacggcgatggcagcaataactcgacatggatcgaactctcggtaataccggttgtcaacttcacgattgcttattcagtacggaaaaaattatcgcaactcgcaacccgcgatttggtcaccgttggtgtaatcaaagggggacaatccgatgccaatgttaccactgcgctgcaggaactcaagggtactccgaattggaacgatgcggttcccagtggtcgcaaattaatcgaacttaccaccaccaaagatggcgggataacctacgtcatcgccgatggcaaggtgaaagggacttcgattgccagcaatgaagtcggtaacactcaccttgttgataatgcggttactacccagaaaattgatgcgaatgcggtcactggaaataaaattgctagcggtgcggtggggaatacacagattgccaatgccgccatcaatgacaccaaacttgccgatggcgcggtaaccgctatcaaagtcgcgaatcaagccatcgatgcaagcaagctggcgagtagcgcagttactacggtaaagattgcaccgaatgccgtcgatggtagtaagctggcaagtgattcagtcgatactacccacctagtcaataatgcggttgatgcatcgaagctggcaagtaattctgtcactgccgggaaaattgctaattctgcggtcggtacagcgaatcttgccgatggcgcagtaatcgataccaaaatttccgatggtgcaataactaccaacaaactgaatgcgactgcactggcagcattcgatgcacataatttggtgcagaacccatcgttcgaatcgggagcatgggtctgatgagtttcttcgatacgacgaccgattactcggtatttggtggtagttcactgcgattggttggtgattctgcgccaccgaatgtcatcaccggacgcagcaatccgatcccggtgcacgggcgcgatgctatcgtcgtatccgcttacgtcttcgcccaggcaattatcaccggaaccgaattttcaggattactgacttcctatgataacaacggcaatgaactcagcaccatcgaatggttaaagcttactgccggtaatggacagtttatccggtattatttggtacaagacattagcaaactcccctataacacctcttcaatccggctctcgttcgcactttctgatccgtcaaataaacctgccggacaagtctatgtcgattgtgtgaagtgcgaatatggtaatcgggtcaccggttattcggagtccgtgttttacgaagagatctgcaaacacatcggtggatttggtgttccgacaatcggcacggcacagttagcgaatgattgtgtaacaagcgggcaactggtaaccgaccccgcctccctcggaaagttgaccggagaggcgttgcaatataatggtgcggcactgaatgccaatgtcccgctcaatgtgaataatggactaaatgcactcggaaaaaccggtattactcagatgatacaagtatcgaatccctggggcggaataattaacattgaaatcactaatggcattattacgagcatcgcatgagtgaatttgaacacacttccggtgaacatctcgaaccaccctattcctgccagtaccatctggctaaagtggagcagattgtacagcaactgcaggacttaaaagaatcgattcaaaccgtgcaaacggaagcgaaggaagaacgcaaggaagtccatgctgcattgaaggaattaaacgatgcgatcaaaggcaacggaaaggaagggctcgttgtgcagatggatcgcaatactaacttccggctcatgatgacgaagctgctctgggtattattcacgccactttacggtggattgatcgcactcgttataaatctatttctatccaaatcattgaggtgaatgatgagtattctcacagcaatccccattgtgggacaaattatcgataaagccgaaggcatcatcgacaagttagtgtcggataaagaccttgcggcgaaactgaatcacgacctgcagacgcagatgctcgcactcgattatggtgcgctggaaaaagagatcgatgccaaggcgaaggtactggtcgcagaggtacaagggcagagttggctgcagcgcaactggcgaccgctcttgatgttggtgtttacatacatcgttgctcacaactttgtgattgcaccgatctttggcattacctccgtgccggtgccggagcagatgtggacgttactcaatatcggaatcggtggctatatcgtcggacgcagtgctgagaaaattgcgacctcattaaagaaggatgactcaaaatgactctggacgacatcgaatttattcctgcggcaagaaccaacgcatattcccgaccaaggaatatcgtgattgacacggttgtcattcattatactgccaatggtagcattgaggatacgattgcgtggttccagaattccgcaaataaagtatcggcgcattatgtaatcggcacagacggacgcattgtccgaatggtgccggacgacaagcgcgcttatcatgctggtgtttccgaatggcagggtcgtccgagtgtcaatgccttttcgattggaatcgaactcgtcaactggggtccgctcaagctgcgcgatgaatcctttttcgcttggcctaatgattataccgaacgctatgatggcgatgagccggtattgatcggcaccgaatattggcagtcgttcccggagctacagcttgctgctcttgagcaactgctcgtgctcctccgcgaagagcacccaatccagtggctggtcggtcataatgaaatagcccccggacgcaagattgacccgggtcccgcgtttccatgggagcgctttcgacctaacgtttgaccctgtcaaccgttcgataatctctcctttcccaatctagttagctaacctacaagccgctacagtagcggctttaacggttattgccttgccttgacttcgcaagaccccgcgcttaaggtgttgccaacaagtaaatccaacgcaaggcattatcatgaaatacacaatacacaaccagaagttcggagtcgagatagagactgccggatgcgagcggaagcgaatcgccgaagcgatcaagactatcgtcaacgggcgagtcacccaagagttcggaacctttcaagcatcgctggtcacgcaacctgatggtcgcatctggcgagtccaaaacgatgcatcaataacaaccatccgcggtcacaagggttccgagattgtatcgccgattctgacctacgacgatatcccgacgctccaattaatcatcatcgcggttaagggaatcggctgtatcgcccatcggagttgctccgtgcatgttcatgtcgatgcgacaccgcataccgcacagtccttaaccaatctggcgaagatggtctatcgcaatgaggatttactcttccaagcgatcggcacctcaccggaacgcagagcacattacactaagccgatggagcaggagttcatcgaccggttgcttcagagtaaaccggatacgatgaccgatttgaaccgggcatggtatggacatgctaatcaaaacccgcaacactatgaccagagccgctatcgaggtcttaattacaacaatttgtaccgctcaatccacacgattgaattccggtatttccaagcctccttaaactcagaacgaattacttcctggattcaactggtgctcgcaatgtcggcaaaagccctcgacctcaaaaagacgactcactccaaaattgaaaccgacaatcccaagttcaacttccgggtcttcatggttgccggtctgggaatgaagggcaacgagttcaaaaccgcacgaaccatcctgcttaagaacctgccgggcaatagtgcatggcgatatggcaagccgcaaaagaatacggaggtcgccaatgtccaataaagcgacgattccctatttcgcgtatggagcgaatctcaatctcgacgatatggaatggcgttgcccggggcatctgcctcgctgcgtcgcctatatcgaaaactaccggcttgtctttcgcggggtggcatcgattgaaccagcaaaaggacatcgtgtttacggtgcgttgtatctgctcaccaaatccgacctcgacgcactagaccggtttgaaggatatccccggttgtatcaccgcaaaattttaccgctccgcaaatccggaaacaatcacaatacgaaagcgtgggtgtacataatgaatgccgaccgtaacggttactatcccccttccggtggatacctcgagacgatacttgacggttgccgtgactggtgtattcctgatttctatcgcaagcaaatcctcaacgttgcaaggaggcaacacaaatgatcaataagcacgaactcgtcaatgaaaatgcggtcttcgtcggcactgccgtcgagatcgtcgaacaactccggacgcagggatacttcgaacggtcgcttccgttccggcagtatctgcggcaactggtcgacaccatcgaaatcgcgggaggtcccaatctttacaaagggatcttcaatgaatcagagaaaatatccgacgaggagttggcggaacggtttatccgcgaactcattaacaacggtctattcaaggaagcgtgagcatctgctcactcaatcgtaatcatcaaatccaaatcaatcactcaacactctcttgaaaggagaacagcatgagtaccacaacaaccaaaaccaagaagcaaatcggcgaccgtgtcgttatcaccggtggctcccgcaagggcattcaaggaaacatcatcgcattgcagggattgaaagcgaccctgcgcaccgacgatggcgaagagattccggcaatgctcgcctggatcgataaaatcgaatcaactcaaccggcacaggaaaccgtagagacacccagcgaacccgtcgagacactggtcgtggagaccacttccgatacgacgaccgaaccacccgaaccgccacaaccgacagtatccgagccggttgctgaatcctcttcacccgaaactgagacagcaccgatagtgaagaagcgaggtcggaaacccaagccagatgccgcatcaacggcaacggtgcaatccgaaccggcagaaacgacagaatcggcaccgactacggaaactgcgacagtcgcaccggaggcaataccggtcgcaccgaagcggacacgcaagcccaaatccaacccggcaccggaaattgcccctgaatcgaacgtggcgcaaaacccctacgaacaaatgacagtagtcgagttgcagaagcttgccaaagagcgtgatatttcaattgctcggacaaaagccgactttgtccgcatcataaaggaaatggagcccgattgcgataccgaggcactcaagggtccggcactctttaacaaggtatccgaactgcacatctcgcggctccggtcgaagaaggatttggtggagttgctctcggtttaataaattttcacgatagtacaagcggatgctcacgacgggcatccgttttttttctgttcaaattttacttgtgtgattccgtattaccacatgctgagattcaacagtggccttcaacatatcaactacagatcgaagattgttggaatcgactgacgatgaatgtattaaatcagtaaatttctctgccctcaccaatgactcatcgatcaatatgtagccttggtataacttcacaaagcataataccgtctcactcgttagagtatccgtgtttatcaacacaccagattttttataggaatgcaccgtaattccaagacaattgagctgatttcggtatcgatgtacagaaacgatatcaacctcgagctgctttgcgatgtcctcgtattgtaatcgattatttttattatttaagcaaatatttacaaattctatcaaccgcctaccatgttcgatgttgctgaataatttttgccacttggttttcctcatcatgctctctttagtcgtaaaaaattctcactagttgatagttatcgtccaaaatgtcatgagtaccttgtggtttgggaaacttcgcgaagcttagttcgcgtgcttccattgattaacggtttcaagggtaaactgtccctaacggctttcatgaatacatttatcgataacaaactatcaactactctcaagctgcatgcggtggcttatctgcgtaagtcgacccgcgagatgcaggaaaactcgattttgaaccagcgcaaagcgattgacgcatttgccgaacatcataacattcacattctgaagtacttcatcgacgacggtatatccggtctaacgatgtcgaaacgggatgcttttaaggagttgattaacgagtacgtcattggcggaaaactgagttttagcatcatccttgtattggatgtaacgcggtggggtcgtttccaggatatcgacgaatcggcgcatttggagtttatttgccgtaagcacggtaaggaaatcatttatgttacggaagagttcaagaacgacaactcgatcatggactctttaattaaagcgttgaaacgagcgatggcggcggagtactcgaagaatttaagcgataaggtgttagccggatcgctgactatcgcgcggcaggggttccgggtcggtgcacctgcgccgtacggttttgaaaggatgcggctcgatcagcaaagaaatccagttggcattttgcacgatggtgagcggaaagcgattgccaatgagcgggttacgttggtgcccggtaatgcagaggaagtggagacgataaaacatatttttggtttatttaccagacgggggctacgggaaggaaacattgcaatcgaactgaatgagcggaaaataccttctcctgggggtggcgaatggacagagaatacaatacgagtgatgcttcgagatgagacgtacaccgggaccttacgatataaccgcacatcttcgcggctgcatggacctacccgcaagaatccgcgtgaccgctgggtattggttccacaggcgtttgaagcgattgtctcacccgacacatttctcgaagcgcagcagatatttcagaaacgacatccggtttggagcgatcaagatatcctacttcgtttgcaggaactattccagacgcacgggaagctcaccggtctgatcatcgagtcgacaccacaaatgccctccaccaatattctaaagaaacggttcggttcgctgttcaatgcttacaaattagtcggatatgtacctccctatgatatccggtttttcgaattgaaagagttggtgaaatccattgaggaacggttgtggcaggaagtatttgccgcattggtggaaatgggactcactgtggtcgaccacggcacacatctctgtttgaacgaccagttgaacattcaacttatggcatcaagtattcgcaacaacaatggcaaaaagcgttgggtgtatcgttttgaccggcaagtagacatcgatcttacgctcgcagttcggcttgccgacgatgcgggaaatatcctcgatttctattgtttcccatctatcgccatggaaaccgacaagttatttgtgtcatggtcgaatggtatctatctcgatgcataccgtttcgacaaaataatcgatgtgtacgatttattcggcgatagcggacatatcaataaggagaaaacctgcgatgaaatcggtacgtgatgtgattgaaattaaaatcgataagatcaaaattatcaatccccgacaacgcgatccggcaaaatttgaagaaaacgtcgaatcgattcggcgacagggattaaagcgtccaatcgtggtgaatacccgatatatccctgaacatagtaaatatgaattggtttgcgggcaaggtcgaattgaggcgtttcaaaaattgggacacacgacgattcctgccttgaccgtcgatgtcgaccgtgaaacggcgtatgtaatgtccatcgctgaaaatgctacacggatgacacccccgcccatttggttcgcgcaagtaattaaaggactcgcggacactgggatgccgattgaacaaatttccgttattcttgaccgtacaccggacaagatcaaggattatctcttattaatcgagcatggggacaaattactaatcgaggcggttgaacaaggaaaagtgagtgccagtgcggcatttatgatcgtaaaagagccgattcccgaattacaacggttgctaactgattgcgtcgaaaacaatgtattcgattattccgatgtaccggcggtgcgaaaattaattaagcaacgtcttcgttttcagcaggaaaataactcgaatcgatccggcaagaccccttatggcgaattatctatcgaaacattgcgtaaagagattcgacgaactctcgacaagcaagaaaacttcgttcgcaggtcgcgccgatacgagaaccaaatcatgattctgatagaagcattcactcgtttgaacaacgatcccgattgggtgtctttgctgcgaaatcaaaaattaacggattttccgaaactcaaagggaagcatttgcaggacctgtttgcaaacttttcaaaaagtgaggccgcatgaacaatatctcttttcgtaccggaacagtgaccttgccggtgaataatctgtatcccctgtttccgcgaaagcttacaggtcatttatgcacgacctatcgaaaaatcgtcagttcgattaaagagattggtttggtcgaaccactggtcgtcgtcgaaaaggaaggacgctactacattaaggacggtgtcttgcgttggacagcgctgaaagagttaaagatcgagtcggttgaatgtctaatcggcaccgacgatgatgtctatacttacaacaaacgggtcaatcccctgacggttagcgagacacatacgatgatcaataaagcgattcaagaaggggtcagtctggatcgaatcgccgctactctgaatgtcaaaaaagagtgggtgcgtaaaatggattcgatgctgatcggagtcgctccttccgttatcggtctattacgtcaacataatgtgtcgaggttgacttgtgaagagttgaaaaaagtgtcctatcatcggcaaatcgaaattgttgaactcttgaatgccgcgaacgacttttcgcgtcgttataccagaactttggtgctttccactccagaagatcaatggagtaaagcgcatccgacaaaaaccgtagggtcagaagcacaaagaaaagaactgacgggaaaactttaccaaatggaagatgagtttaaacgggctacaagtagttatcgggacaatgtattcgatttggttaaatttaccggatatgtacggaaggtaattgccgacttggcggtacgcgctttccttgaacagaattatcccgatatacaacttttttttgaaaaagtgattaacgatcatgaactggacgtttgatcatcggtagtgcgacaaagtttacgcatcgaagattgcaaaccgtcgttacaaagtgtcatacttaatctttcaagtagtacggaatgtaggattatgccccgagccgaagaaatactcacttttatcaaacttattggaattgttcaagtaagcgacttagtaaaacaggatatccaacgagatgttttagcccggttagtgaaggaaagcaaactgaagcgggttggccggggtctatactgcgtcgctgactaccaaccatgcatgcatgctgaatttattccggttgcactgactatacccaaggcgactatctctttgttgtctgcgctctggtatcacggtttattgacacaaatacccaacgaaatatggattactcttcctagtgaaatgcgcactcccaaaacggactttctccaattgcaggtgtcaagaacatcgcctgatattattaaggtgggacgcgaacaacagttaattgaggatactccggtgtacatctattcgttggaaaggacgatcgtcgattgtttcaaacatcggaaccgaattggtttggatatcgcaactgaggcattacgtaacggtatttatcaaaagaaagtcaatccacgcaccattatgaggattgcgaggctgttgcgtatggataaaattattaaaccgtacctgcaggtacgaaaaattcagaaaaacgcggagtcctgtgaaatcagcttgaactcaggtctgtaaaaaatgtcttgccctcgctttacctgtaattacattgtgtaggttagcgttttgccgcctccgatatttatatcaaatcttcgtttttctttgccctgaaagcaacctgacgagacctctctgagccgtaaccaatatcgtaactcctgatatttccttatcggcttccttaacgggtttttcctcaaccggtaatgtttgttatactaacacctgttagctatactctggtaaccgggtaacgaggcaaaaaatgagcgaaatccccttaaccgaccgacagtcggaattgttgcaatggatcacccaatatttccagaagcatggtcggactccgacgatgcaggaaattggcgaccatttttcgatcagtcgtccgaccgcattcaatatcgtcaagcccttgattaataaagggtatctgcggaaagtcggaagcggaccgtttagacggttggatatcatcgatgagaccggaaccatcttgaaacaacaaggggttcccgtagtcggaagagttgccgcaggtttgcccctgttggcgacagagaaccggattggatggatgcttgtggatgacgtttttgtgcgccggggggcaacctatgtgctcgtggttgaagggaagtcgatggtcggtgccggtatcctgtcaggggacaaagttatcgtccgaccgcaaaaaacagccgaaaaggggcagattgtcatagcgcggttcgatgacgaggtgacaattaagtatttccatacagtaaaaaacggtatggtcacgctcaaagcggcgaatcccgaccaccaggacattgtaaaaccggcatccgagtgttcgatacagggaattgttgtcggattgtgccgcgagtacccgatgaaataagtgtcagattttgacgttcaaacacattcattgatgagatgaagatgcagattacacaactcagtcgctacgattttcccgaggacatgattgccaactggcggaaactcgggatacagaccttacaaccaattcaagtgcaagcgatacagaagcataagctgttcgacggcaacagcatgatcgtctccgcgcccacttcctccggcaagacatttatcggtgagcttgccgccgtgtatcaagcaatcaacaaaaagaagacggcattcctagttccactgaaagccatcgcagaggaaaagttccagaccttccgtcagatgtattcgtcgtctggaatcaaggtggtgatctcgactcgtgatcataaggagtatgactcggacatcgagaatggtaaattcgatatcgcgattatcgtttatgagaagttctttcaattactcaactgcaataaaacgttcctcaataaattgggtctggtagtggtcgacgagttgcagatgctggcggacatcagtcgtggaccgacactggaaatgatcctgacccatcttcgcatgcaacgggagcaactcggtttccaactcgtaggactatcggcagttctgggcaaccatcggttggtcaatgagtggctggatatcgatttgttgcattacgagcgccgcccagtggagctgcgaatcggttatctctatcaaggtgtgtttcattaccgtacgatgaacagtccaggcaccggtgacgaaacgattctcaaacgaccaccggaggatcgggctgaagtattatatgcggcggtgacaaaattcagtgaagatggtgaacagtcgttactttttttgaaagacaaaaattcggtgcgcggtgtggcgaaggcgcttatacaatggatcaatgcgccgagtgcgaccgatgcaatcgcggaattggagactttggaagagactcattcccgcgacgaattaatggaactgttacaacacggtatcgcattgcaccatgccgatctgaccatcgaggaacgagagctggtggaacgccactaccgtaatcgcagtatcctggtgttagtctcaacatctactttggcaatgggtgtcaatcttcccacccgaaatgtgttcattgaattgcagcaatggcgctatgatccaaagtttaaaaaattggataccgtcgatttatccaaaggtgagttcgagaatatgggcggtcgtgccggacgctaccaattagaggatgaattcggtcgtgcgattgcgttggcgcattcgatagtggagcgggaacagatacgccgattttatttggaaggggaattggaggaagtcaaacccaatctctggcgttcttcgatggcgacgacagtgttgggtgttgtctcgttactcggtggtggttccaccgaacagataaaatcgtatctgcgcaattcattgagttggcatgtccatgaaaaagatgcgcaacaacaggaggagttgaaccaagagttggattgcggcctgaattattgtttgcgcgcgggtgtggtttccggtacgactggtgagaaactgactcttaccgagtttggaaccacggtagtcagcatgggcatccgggttgaaacggctcacgttattaagcaatggttatcgcaacgggacgatcaagctatttcgtgcatggaggcggtgttatttgcgctattgactgccgatggtcaagaaggatatgtcaatttctccacttccgaataccattaccatggttacgaatatacgatgcgagtaacagaacagattggctcgaatggcatggcaatcttcgattcagtttgtagtaacaacatcgatcagtataaccgggcaaaaacatgtaaaagcgctttactgttgaacgattacatcggtagttctaccaataaggaattggagaaaaggtatcaaatttacttgggtgcaattcgccgtatggcggaacaaattgcatgggtactatccagtgctgcagaactcgcaaaaacattgggttatcccaattcctggcgtaaatcactggatcaaatcgcgatgcaagtgcaatacggtgttccaaatgcgggtatcgcactcgcacagttgcaaatcccgcgactcggacgcgaacggatacgtaaacttgtcgctgccggacttaccgaaccgcaacaaatcttggaagcgggtgctgccgtgttagccaagtacgtgacaaaaccggtcgcaacttcgttacttgcctggtgcaagcaccgcactcaagcggttgaattggaaaccgcgctaagcgacactaccgatacaaatacctcttcggtgtcgatagagaataaaggacaccataatgtagtcgtgggcgtgaatcacggaacgatcatcatgaatccacgtgaaaacactcaggtaaaaaaagcggaaccgccggttgatttgtcaacactgccattgacgagttggaaacgcgaagtatcacagcgcctcgaatccctaactcccgaggcattggaacagttgtacgaagagacgcgggcaacccggcacgatagaatccgcgcagcatgcaacgagttgaaggcgatgacaagcattgccgatgcgacgcgacgaatcaaacaactgaaagatgaatatgtcgcgtttacaacactactcaacgatacgttacatgcaattgtgataccatcgtttatatccgattttaccagtctgttgcggagtcgagcgagtttcgataccgtccgaaaccgtgcacttgctgtatttgattcgatactggttccactgaatgggctgatcaagctgctggaatcgttccgcgtttctcccgaggaactattattggaagcggtacaacgtagccgtccggtattaaatggaacgaacattgactcggatggtttgctggacgagttacagcgaacggaacgatttctacccaagcaacaactggtagaagcctttggtaacctgttacggaatgccggtgatagtttacacaatactgacgacccgataatagtcctgtcgtctcgtatcgagtccaaccagacttgccttaccatccgtgataacggttgcggcatttctcccgaacaacatgagtcgatattcaataacggtttctcgaccaaggatacagaaggattcggacttgcccgagtcaaacacacactgcaatctctcggtggcgatgttcgtctcgtcgagagtgaacccaatgtcggcacgacattcgaggttgttctatgagtggaaacggttcgggttgtcgagtccgcatcttgttggttgaggataatgaatacgaccggcagacgattcgtaaggcgtttggctcgcagttcgatatcgatgcagcgatccattattcgcaagcgatggagaaactcaaatccgaccaatacgactttgtactactcgacttgatgcttcccgaacggcatggtgcgaaaattatggaggatggttcgttaggattccaactactcaaatatattcgggagaatgagccgctctgtccggtagtcgttatctccgggatgcaatcggtcaaaaccgctctgaaagtgctttccgttggtgtcgtcgattacattgtaaaagaggaattgatagaccagctaccggtgattctaaaaaagattgagctaattcgtcgtggtcaaatcgagagcttgatgctgcgtcgcactcagacgcatggctccgaacggaagttcatctacgcctccgaacaaatggctgctatcgataagcagattacgaaagtggcacaggatgacacaccggtaattctgcttggtgaatctggtacgggtaaagaagttgtcgcgcgcgaaatacaccgacgtagtcaccgcacaaattctccatttatcgatatcaattgcggtgcaatcccggaattgctgctggagaccgaatttttcgggcatgagaaaggtgcgttcaccggtgccgataaaatcaagaatgggttgttcgaactggcgcacaatgggacgctgtttctcgatgagatcgcggatttatctgcaccattgcaagtgaaattgctgcgggtcctgcaagaaaaaacgtttcggcgcgtgggtggtacgaaaaatttactggcggatgtacggattattgccgcgacaaacaaagatttgcatattgagagggctgaaaagcggttccgggacgacctttactaccgaatcgcaggactagttcttcacattccgcccctgcgggaccggaaggaagacatcgaagcgcttgctaagtactttttgctcaagctgtctcctaagcacgatattgtccttaccgagcgtgcgatgcaggctctaacggcgtatctatggccgggaaacgtccgcgagctggaaaatataattcatcgactcgtgttccacgccgatagcgacgagatcgaccggaaagacgtgttggcgatactcccgacgacttcgcagtcactgcaaacagtcgtttccgagacattgaatttgcgacaggttgaaacgtcggttattcaagaagcaataaggagaagcaaaacccaaaaagaggctgcaaagttgcttgggattgcagagagtagtttaaggcggaaacttagctaatgttactaatttgtaacattgaagtggcacacagaattttatggaaaaattaccgctaagtaaactcgaacaacaccttgctaaagctgcatggatactaaaaggtccagtcgatgcggctgatttcaaggcatatatctttccactccttttcttcaaacgcatttctgatgtgtacgacgaggagcttcgtcatgcactcgaggattcgggtggtgaccgcgagtatgcttcccatgccgaatttcactctttttctcttccggacgattgtcattggaacgatgttcgccaagtaacagtaaatgtcgggaaggcgttacaaaaagcattccgaggaatcgaaaaagccaaccagcagctcctatacggtattttcggtgacgcgaactgggcaaacaaagaaaaacttcctgattcgctacttaccaacctcatcgaacacttttcccaatacaatctgtcaaacgaggcagtcgaacccgacgttctcggtaaagcgtatgaatatctgattagccaatttgccgaccttactaataaaaaggcgggtgaattttacacgccacgttcggttgtccatttgatcgggctcattatcgatgtccaagaaggtgaatccgtttacgatcctgcctgcggaaccggtggtatgctgctggagagtatcgagcacttgcggcgaaccaaccgggattaccgaacgctcaaaatgtacggtcaggaaaaaaacttgacgacttccaccattgctcgcatcaatatgtacctgcacggcatcgaggatttccgaatcgagcgtggcgatacgctgcgtcaaccggcattcgttgaaaacgatcaactccagcaattcgattgtgttgttgccaatccgcccttctctttaaaagaatggggtgcggagcaatgggtgaatgatccctacggacgtaacatcgccggtgtgccaccgaagggaaatggggatatggcttgggtacaacacatgattcaatccatgaaacccgataccgggcgaatggctgtcgtgttacctcatggtgcgctctttcgaaagggtgcggaaggtcgtatccgtcaaaaactgattgatagcgatcggttggatactataatcggactgggagctaatgtattttatggagcgacacttgcggcttgtattctgattttccgggcgaagaaacccaagcaacgaaaacggaaggtgctgtttatcgatgcgtccgatcaaatcagagtcggtagagcacaaaatttcctggaagcacagcatgtcgaaacaatctataaatggtatcgtgagtacaaatcacttcctgatcatgtacgagtcgtcgataatgaagagatcgtaacgaaagagtacaacctcaatattccgctctatattgagaaaaccatagtcgacaacctcccttcgatggaagaggcgattgccgaactcgaaattgcagcacaagcggcatggcaagctgaagatcgctttaaagagttgctcatggaattcgggttgctatcatgatgaaacgcaaggagctggaaagttatctttggggtgcagcgacctatctgcgcggccatatcgatgccggtgattacaagcagtttattttccctctgttgttttacaagcgaatttgtgatgtttacgacgaggagtaccagcaagcattagccgagagtggcggtgacctggagtatgcatccttcgccgaaaatcaccggtttcaggtgccgaaagggtcgcattggaatgatgtccgctcggtgactcgaaatgttggcgaagcgctacagaagggtatgcgcgaattagagaaagcgaatcaggaacaattattcggaatattcggagatgcatcgtggacgaataaggatcggttgaacaatgagacgctcaccaacctaatcgagcatttcagtcagcatagtctcagcatcggtaatgtcccccaagatgaacttggtgatgcctacgagtttctgattaagaaattcgccgacgacagcgggcataccgccgcggaattttataccaaccgtaccgtcgttcggttaatgacgttaatttccgacccgcaaccgggagagagtgtgtacgacccaacttgcggttccggcgggttgttattgaactgtgcgctccagttgaaagacacgggtaaggaataccggacgctgaaattgtacggacaagagatcaacctgattacttcctcaattgctcgtatgaatatgtttatgcacggtatcgaggattttcagattgttcgcggcaatactctcagcaaccccgcgtttctggaaaacgaccgactgaagacattcaacgtgatacttgccaatcctccatacagtatcaaggcatgggatcagaaagcatttgcgagcgatccattcggcagaaatatctgggggacgcctcctcagggatatgccgattacgtattccaacaacacatccatacatctctcgatcctgacaacgggaggtgtgttattctttggccggatggtattctctatagagatgccgaatctgctatccgccgtaaaatgatagaaagtgatgtggtggaatgtgtgatcggtttgggaccgaatctcttctataactcaccaatggagagttatctcctgatctgtaggaacaataaaccgaaaacgcggcaaggaaaaattctctttatcaatgccgtgaaagaagttcataaagaaaaagcgacgagttacttggaagagaaacacattcagaagattttcaatacatatcatgactaccaaacgatagacggcttcagcaaggttatatcggttgaaggtgtgcttgataagaaagctaatttgaacattacgctttacaccggatcaatgcagaaaaccggtaatggtgagaacttacacgatgcaattgatcaatggaatagtagcgcagatgaattacgacagtcgattcaaaagctgatagcgaaactacagtgaagcaaacattcgacaagcaaggttggaaacgaatcaagttcggtgaagtatgccgcaacttgaatattgccgagcgtgatccattatcgaatgggatcgaccgatttgttggattggagcatatcgaaccggaaaacctacatcttaagtcgtggggcaatatcgctgatggtataactttttcgaaacgattcaaacccggtcaagtactgttcggtaaacgtcgttcgtatcagaaaaaagttgcgtttgcagagttcgatggaatttgttctagtgatattctggtcttagaagccaatgagaaacgaatcgaaccaagtttgttccctttcttattacagagtgagcggttcttggagcatgcggttaatacatcggctggggctctttcacctcgaacaaagtttcaagaccttgctcaattcgagttcctccttcccccaaaagaacaacaagcgaaaatcgctgaattgttgtgggcagcggataacgccacacaaaaggcaatatcgttggtaaatgggctaggagaacttctaaaactctcatcagatctaatttttgaaacatacacaaagaaaccaactattaataacgtcagaaatttggatgggtatcaagagtgtcccgtaacggatttgttaagcacaaaactgcttaatggaatttataaatcaaaagaatatcttgggcatgggataaaattggtaaatatgggagaattattcgcttatcctaaactgtataacccggatatgcaaagaatcacgttaagcgataaagaggaaaaacaattcttacttcaaaaaggcgacttacttttcgctagacgttcgttagtcatcgaaggagctggtaagtgttcgattgtgatgactgatgaagagaaaatgacttttgaatcttcgattatcagactacggctcaacacaaaattaatactcccaatgtactgccattattttttccggtcttctgagggtgtaaaaagaataaagagaatagtcggatatacaactgttgccggtattactggatcagatctctacaatatttcagtaccggttatcgaaaaaaaagaacaagaaaaatgtgtcgaaaatttgggcagaatcgaagagttaattactgaagccaaaaaccatgttaccaaaactgagaatgtaatcaagaatttaattcacaaggtgttctaatatgccttttaccgaaatgaatagcgtcgaacatttcattgtgcaacaactcaccggtgtcaatctgaatgccggtgatggggttgtttcatctccagacactggtcgtcacgtctggcgctatatgcctaccgacacactcgaccgcgagattactgaagttcttgttgaaagcgagctaaaacaggcactaattcggatcaaccctgaaatcgccgaacaacccgaccgcgccgacgaattgattcacaaactacgcgccatcctcatcacagtaaataatgtgggattagtaaagtcaaatgaagagtttgccaagtggtacaagggtgagattacgatgccgttcggcatcgacggtaagcacgttggtgtaaacctaatcgactttgatcatcctgaaaacaactcctatatcttgactaaccagttcaaaattcgtgcccgcgagaccaagattcccgatatcgttctgttcataaacggcattccggtagtagtcggcgaagcgaaaacgccagtacgaccggcagtaacatgggtcgatggtgcgcacgaaatccatgcggtttacgagaatactgtcccgaatctgtttgtacccaacatcctcagtttcgctaccgacggtcgcgatttcttctatggtgccgttcgcacaccacttgaattttggtgcccatggcgattggatgaatccaatagtactcttgcacttttttccggactgaatgaagtcggtaaacaactcaacagtttgttacgaccggaaactttgctcgatatcctgcgtcatttttcaatttatgcgaccaatccgcaaaaacgcaagatcaaagttgtctgtcgctaccagcaatatgaaggtgcaaatgcaatcgtacagcgggtttccgaaggacatatcaagaaggggttgatttggcacttccaaggttctggtaaatcgctactcatgctatttgctgcgcagaaactgcgaaagaaagccgacctcaagagtcctactatcatcattgtcgtggatcgggtcgatctcgatacacagataaccaatactcttggtgctgccgaagttcctaatatggtcaatgctgatagtatccaagcgttacacgacctgctcgaacgcgacatccgtaagattattgttacgacgattcacaaattcaaggatgcctatcccgacatgaatctgcgggataatatcattcttatggtcgatgaagcccaccgcacacaggaaggtgatctcggtcgtaaaatgcgtgcagcactcccgaatgcgtttctcttcggtatgaccggtactccgatcaatcgttccgacaagaacactttttgggcatttggtgcaccggaggatgagggtggatacctcagccgctatacatttcaggaaagtatccgcgatttacaaacgcttccacttcacttcgaaccgcgactccccaatgttcacattgacaaggaagggctcgatattgctttccgcgaaatggctaatgatctaacggaagaagatcgcaacaaattgagtcaaaaagctgcgaagatgctgctcttcctcaaatcgccagagcggatcagaacgattgtcgaagacattgcgaaccattatcgcacacatgtcgaaccgcacagttttaaagcgatgattgtgactccggatcgtctcgcttgtgttgcttacaaagaagcactcgatgaacaactcggtgtggatgccagtcgagtggtcatttcaacgaccgcaaacgacccactcgaattcaaacaaaaatggggattggataaagaccagcaagagaaagttattgagcagttcaacaatccggattctcaactaaagttcttgattgtgaccgctaaattacttgccggattcgatgctcaactcttgcagacgatgtacctcgataaatcgctgaaagatcacacattattacaagcgatctgtcgcaccaaccgcgtctatccaaataaaacttacggtcgcattgtcgattactttggggttttcgatgatactgcgaaggcgttagagtttgacgaagcgactgtgcgtgctgtaataacgaacctgcaggaattgagagacaaacttccagaattgatcgagaaagcgtgttcccattttcccggagttgatcgtacgattgaaggattcgaaggtctgagtcgggcgcaggattgtatcaactcgaatgaaatgcgcgatgcgtttgctaaggactacgtcactctatcaaaagtgtgggaagcactgagtcccgattcaattctcaatcgttttcagcgtgactacaaatggttatcgcaagtctatacctctgttcgaccagcttcggatgacaacggacgattactctggcatgcgtttggaccgcagacggaaaaattgattcacgagcatgttcatgtctccggcattcacgatgacatggaagagatggtgctcgatgccgagttaatcgacggattgatgaatagtaaggacactaagcgagccaaacagatcgttcttattcttgtcggtcgattagggaaacatccaggtaatcctaagtttaagaaacttagcgagcggttagaggaattgcggaatcgtgctgagcaagggttgattagcagtatcgattttatcaagcacctctgccaaatcgcgcgcgatacgttagagaccgagcgtgagttattttctgcagacgaacggagaactgccaagacagcacttacagaactttttcttgaaatgcgcacagataagacaccgtcagtagtcgaacgcattgtcaacgatatcgatgagatcgtgaaaattgttcggtttgacggttggcagactacgattgcaggagagcgcgaagtccagaaatcgctacgcaagactcttctaaagtatcagcttcataaagaggaagaactgtttgagaaggcgtatgcatatatcaaggaatactactgagcgaatttgtagttgagtacattcatgatctgatgagtttcagtcattgagagcgatttatgcctagtaaaaaacgacaaatagttgaacccaatgagaaacgtcgtgctttaggtcggactcgagccgaggcaacttttcctgtcgcagcacccctatcagggatgccaaaaggttacaacgaatttttccagcagatcaaacaacatattcaacgggaacgattgaaaacggttcttgctgcgaatgccgctatggttttactttactgggatatcggtcggacgattctcgaacgtcaggaacaggagggttggggagcacaagtaattgatcgattgtctgtcgatctacaaaaatcgtttccagaaatgcgcggcttctcgccacgcaacctgaaatacatgcgggcatttgcctctgcatggactgaccggacaattgtgcaagaggcacttgcacaaatcacatggtatcataacctcaccttattggaaaaattagacgatcctgaaacacgcttgtggtacattaacaaaaccgttgagcatgggtggtcccgcaacattctcgcattacagattgactcacaacttcacaaacgccaaggcaaagcaattacgaattttccggtaacgctccctccaactgaatcggatatggctgcacaggtgttcaaagacccatatttgttcgactttttgggtactgccgatccccggcgtgagcatgaaatcgagcaggcattggttgaccatattcagagttttctactggagctgggagcgggatttgcctttgttggcaggcaggttcgattggaagttggggatcaagaattcttagtggacttattattctaccatctcaaattgcgttgttttgtcgtaatcgagctaaaagctgtaccattcgatcctgctttcattggacaaataaatctttacctatctgctgtcgacgatctactacgtcatcccgacgataagccgacaatcggattgctactatgtaggacgaaaaacgagttggtagtggagtatgcactacgcagtttgaagaaaccaattggtgttgccggttgggagactaaaatcgttaaaacacttccaaaggagctgaagggaagcctgccgtcgattaaagaaattgaggatgaacttggcaaccacgaataatgaactacgttatatctttcaactacgggagcgcttatgtgctataacctgttagagaaaaaatggattccggtactctatcgaaacggacaattcgaccgggtcgggatcaaagacgcgctaattaaagccggtcaaatccgagagatcgccgcatcgaatccgatggacaggtttgcagtgatgcgttttttgctcgccattttgtattggtgcaaggggaatccccctgatgaaacaaatatcgattcgtttccagcagagtggttttccaaacttgaagagacagagaatcgggattgcttcaatttacttggaaacggaaagcggttttatcaggatgctgatgcaagacgttctcgtcccacgacagatttgtatcaagagataccaactggacacaatttttggcattttaaacacacaaccgattttcaagaggggttgtgcgcttcctgttgtgcaataggactacttcggctcccattatttatgacttttggtggcaatactaaaccatacctttatccgggaataaatggagttccgcctgtttacataatgtcggtgggcaattcgttgttcgagactctccacaaaaactggatacctcgcgccattcctttcggtgaaccatcttggatcgacctcaattttaatgtgggcgacactgccgaaattccactactcaaagggctaacgatgctcgcccgtaaagtttggttggcagaaacggagagccatcaaacttgctacaactgtggagtaaaatccgatacgattatccgcagttgtgaatttcaatcgccaggtaagcaggaaactgccctttggagagacccacacgcactttatctcagtagcacttctcaaaaatcgataaaagcacctgatccggtttcggctggaaaatttaagatggatcgacccttatggaaattacttgcacctgttatcgaagccgctaaaacgatttatccaacttcgaccacttttgctatcatcggtctcggtacagataatgcgaagtatgtcgatgtttgggaacgaattgttgagttaccatcaaataattcagtacccgaagcagcggtgtctacggttgagcaatggcagaaagagacatcgaacaacgaattcgtaaagcgtctgcctaagacgatgcgagtgaaacggaaactcgatcacctgaaagcaacctacgattccaatcgtcctcatgtcgagcatgccgtctcaacagctgttgggaatcttctatccgggggtgaaacggaatggcaaaacgcagcatcggaatatcgtccaatgcaggagatgatcgcgaaatcactcgcacccggcgctacactaacagcgacgatacggcgaaagagtatcgcgaacgcattacccgatatgcgagcaaaacatgacccaccggagaaaacgaaacgtagaaagtcggctacagaatgagttcaaccaatgattttatcatggtcttacaaacattaaaagcaggtgacctaggactcttgcgaacccatgctaataaaggacttgaccagactgttgatgggttcgatctgtttaccggtttgtggtggccgctacggcaaaagaaccagtttgcaccgcgacgggaagtcgcgtggttgatcgctaaactatatgcaaagtgtcccattgaacatcagtctgattgtttgtttgcacaccaactacagcgatgcgaaccaagagaagaacgtgcgcgaaaccggtttcgacagaaattcgatgaactgataaccactcccttggagcaaatcgagcccacattgcgaagagcgcttcaagaaatttcttcccatgaattgaaactcgactgggtaaaactgaccgatgatctctccttttgggaacaggagaccaagcatcaggaatggataaaccaatatctcagcatcaacgaaagggtacaaccatgttgatcgaaattcacatgatccagaaccacagcccggcgaatcttaatagggacgacctcggcgcaccaaaaacctgttatttcggtggtgtattacgctcgcgcatctcgagtcaatgcatcaagcgaagtattcggatgagtccagagtttgcgaaactgttaggaggagtaagaacgcgcgatctcgctaagaggattcttgacaagatcgaaggtgatgcaaacgacaaaaaacgagtcgaaggcattctcaaagtttgcggtttcaaaccaaagactgaatcaaaagcgaagaaaccgcgcaccactgcaggcgaagaaggagagaccgatgaatccgatgaaaccagtcagagaagcaaggcaccgctcttcgtgacccaacaagccattgagaagattgtgaatctcttccaatcaaggaacagcaaatctgatgatgagttagcaaaagaatttgcgaaagcaatcgctctttacacacaagcgcccgatatggcactaagtggacgtatgcttgaacccgacaaatctgcgaagaaaatttgggaaaaactagaaaagaatgtcgaggcatcgttgcaaacggctcacgctatatcgacccacgccgcctttcctgaaactgattacttcgtggcaatgggagacgaaacacgcgaggaaaaagaagaagctggtgccgatttaatcggtgaacaactatttgcttccgcgtgtttctacaaatatttctccattaattttgagcaacttgtagagaatctcggcgataacaaacaattagccgctcatacagtaggcacatttattcgcactgccgcagtagtaaatccgagtgggaagcaaaacagtttcgccgcgaacaatcctcccgatgggatactcatcgagatcaaaggcacgccaatcagctatgccaacgcctttgcgaatccagtgccagccaaaggggaacgggaaatcatttcacaaagtatcgctcaattaggtcaatatatgcatgaccttgatactgggtttggcatccctaaacagcgcttctggttttcacccaatcttcgctatcccctctacgtggttgaaaacaaacaagagatcgcactaaccgaccataatatcaagtcacttgatgaactgataccaatggttatagctgcaatcggtttcgactggaacgaggtacaacaggcaatcgttaacaacgaggcatagcatgagcgatctgcccaatacgctctttctccgcctagaaagttccatgcaatcatggggtgtacacgaatcgaaattcgtagttcgacgaactgccgaagcgccgacgaaatcgggagtcatcggattgttctgtgctgcgctaggtattacccgtcaacaagcgccggacgagtggttaccgaaactaagtgaacttcgaattggtgtacgaattgatgtaccgggaattcgctggtgggattaccacaccgtcggtgccgaaatgcaaatgcgaaccgcaaagggagaatgtaagtcgggagcaatgctcacccgacgcgagtacctttgcgatgccagttttttggtagtattgcagggcgacccatctctcattcaagagttagaaaaagcggtcaaatacccacagtggacactctaccttggtcgcaaatgctgtgttccgtcgcgaccattgttggaacatccggctgggttctttcccgatccgctctctgcgttaagttcgattccgtggcggaaacgactcaaacgtgataacgaacccaaaaagaacctcgtctgcctgatcgactggcaacccacttcggaacaacccgacgcccctgacgatgcacaggtctggtacgatataccggttagtttcgatccgccctcgcatcgacctcgattcgtcattcgtgaagagttgactgttggcgaacatgggcagataagcattgcaaatgaaccattgcagcacgaaacaccgcgaccaccaagaccccgcgccgattacactaatacgaaatacaaagcgaaaagacgcgaacggctatctcaggatcagcatctctgcgtcttctgcaaatctccggcaaccaccgtgcaacatattacctatcgacacgcgggaggcgaagaaaagcccgacgaattgcgttcgctttgtcgactttgccatgatgccgtgacgatgatcgagtatggggtcgggatgggattagatcgcatcaatcccgaagaggaacgttggcgtgaacttatcatcgaaaaacgctctgaaattgtcgcattccgttcattggaaacccgtcgtcgtcggctatccatcgaggaggtagagtgatgtatcattccaatctcatgatcgatgtcggcgataatccagaccgacctcgccccggtcgtttatggttgcgtaacatctatcacgttcatcaacgattgtcgatggcatttcccatgtccacgacgcaaaaagtcgatccgaattttcttctcccattcgatccaaacgggtttgaccgctctcgttttctcttccgtatcgatcaaatcgttcgagataattatcaacagacgatcatcattgtccaatcggaaacggagccagattggaagtatgcgttccacaacttagatatggttctagcagcaccaataaagccatacgagtacactcctgcatttcagaatggggacattcgtagatttcggattcgtgtcaatccgacgaaaaagagtgctacctacggatcgaatggtgcagatagaaacccttcttccaagtcgcaagggaaacgtgttactctttgggacaaagagacaaaaccaacagatgcgatccttgattggtttgctcgcaaaggatcgcagaaaggtttttctgtcggtagttgcgatgtcgtgaacttgggatgggtagttggtaaaaaaccgaacggaaagggtgacgaacacgtcatgcgctttcgttctgcattgttggaaggaaaactgactgtcaccgatgctatggaatttcatgctgcgataaatgcaggaattggatcggcgaagggattcggatttggtctactttctgtcttcccaattggagatcaccaatgaacgatctccgtgccctacctaaattacgtgatggtttatcgtatgcatacttcgaacattgccgggtcgaacaagacgaaatgtcgattgcggtttggacgaaagaaggaatcatacccgtacctgctgcttcacttggtgtattgttgttgggtcccggctcaacgattacccacgcggcagtgaaagcgcttgctgacaatggttgtatggtattgtggacgggtgaaggcgcgatccggttttatgcgaccggtatcggtgaaacccggaaaggagggcacctcgaacgacaagcggcactgtgggctgaccctgagtcacacgaacgaatcgtgcttcgaatgtaccggatgcgtttccgaaaacgattaccgaagggtttatcattggaacaaattcggggaatggaaggtgttcgtgtacgcgaagcgtatgcgattgcctcgaacgaaaccggtgtggagtgggtcggtcgaagctatgaccggaaccattgggagaattccgatccagtcaatcgcgcactttcggcagcaaatgcctgcctttattcgttgtgccatactgccatcgtgagtggcggctatactcccggtcttggtttcgtccatgtcggtaaagcgctctcattcgtgtacgatattggcgatctatacaaggttgagacgacgatcccactctcgtttcgcgtcgtacaggaatccactgacaacttggaaagtcgggtgcggcatctctgtcgagattacttccacgagtacaaattattagaacgtattttacctgatatcgaccgtttgtttgatttcaacttggacgacgaatctttcggttgggatatcgatgaagacccggcacgtccaactccgtattggaacccaccggaagtggaaaaggaattgacaaatggtagtgatgattcttgagaaggttcctgcgtcattgcgcggtgaattgacacgatggctgttcgaagcaaagaccggtgtctttatcggaaaggtttccgcgatagtccgcgataagctttgggatctttgtgtgggtcgtcgtggaacaccagcggtcattcaaatctggaacgacaacaatgagcaagggttttcgttgcggtcgaatggcgatacatcaaggaattttcaggaaaaagaaggattgtggtttgctgtaaagcatcttcctaaagaggatgcagttgccactgatacttaacacccttttcgtgatctaacttcaatgattacgaagggtaatccccacgcgcgtggggatgaaccgttgaacactccaattttatcaaaactgttgaggtaatccccacgcgcgtggggatgaaccggcgttaaaattccgcgcgttcgacattgaattgtaatccccacgcgcgtggggatgaaccggttgttccgatacgatacttcaataatttaggagtaatccccacgcgcgtggggatgaaccgagcaatagcgttctgaagtctctccggttcgcgtaatccccacgcgcgtggggatgaaccgaatattatagcgaccgcctcaaattttgttgtggtaatccccacgcgcgtggggatgaaccgaaaaatccacgaacacgaccaacacaatactgtgtaatccccacgcgcgtggggatgaaccggacgagctatcggccgcattccggttggccgcagtaatccccacgcgcgtggggatgaaccgttttgaccgcacatataataaatgcgatc

SEQ ID NO: 943 - DNA, 103454 bp, Artificial Sequence
  Synthetic Oligonucleotide
agcaacctcgagtccaaccgcctgttcaccggctacaaagtctggcgcttgctgcagggcagtgaaggcgatgaaaccagctggacccagcttaccaccaactccatcaccgacaccagctatgtggacaacgcctggggcggacttccggacggcaactacaagtgggcggtgaaagccttctacaccaacgatgtgcccagcgtgccagccttctcgaacatgctgcgcatcctgaggcaagacctcgccgcaaccctaatctccggccccgccaccacctccgtgggtgtagccacaacctaccaggtaactgtggaaaacaccagctcaactactcagcttggaaccaactacacggtcaaactgatgtctggaaccacagaactggcctcggtaaatggagttaacctgacagcaggtcagacgcatgtgttcgatgttgtctggacacccaccacggacggaaccatgagcatcaacggaaaagtggtgttgaatggcgataccgtgccgaccaacgatagcacacctacgatccttgtcatggtgcatcccgcgggcaccgtcacctacaccgtgggcgatggctcacaaactttccgcaccccgatcgatttctactggaaaaactcggtgcaccagtatctgatctatcccgcagaaattgacaacttcatgggcatactcactggtatatgcctctacaacaacttcacacaggacctgctcgacaaacccatcaacgtctggctgggaaccaccacggcagaagatatgacagccggctggatcccgatccaaaaccacacacaggtcttctccggaaacctgaacttccccattggagaaaacgtcatcaccatccccttcgcaaacccctacctctatctgaacggcgaaaacctgatcctgaccttccagcgcccgatggataataattactacaacagtacaaactacttcaaagcccagaccgtcggttccaaccgcgcccgcaagattcagtctgactccgttaattacgatcctgccaacatgaccgcggacggaaccctcaccgggcagttccccatgaccacactcttcggcgtccccggcggagtggggcatctgaacggaaccgtcaccggagcgggcggaatgcctctggaaggcgcggcagtagcatttgccactggcggatacaatgccgtcaccaatgcccagggacagtatctgatccataatatcctgcccaacacctacactgtcaacttcagcgcctacggccatattgacgccacccggaccgtaaccatcgcagaagatgtgaccgagaccctgaacgtcagcatgaccccaatgcccactgtgagcgtgactggccaggtgaacgcttccgataccggagcgggcatctctggagcatccatccatctgcaaggctacgccaattacgacgccaattccaccgcctcaggcagcttcaccatccccggagtgtatgccaaccaaacctacgactatgtgatcatggctcccggatacacctcggcgcagggaaccatcaacgtggcttcagccaacctcaacatgggcaccatcgtcctaaacgaagtggcttacgcgccacacacagttgtagccgaagagaacagtaccggatcgacagttgaactcacctggcaaccgcctgatcccaacgccgtcgaaatcacggaaagctttgaaggcaacgccttcccgcccacggattggacccagaccgtcaacaataccggcgagcccaccagtaacggagtgtaccccacctggtgccgctttgggccaatcaccatcagcggccagcaagccaaccccacggacggcgcttatcagagcggcctgtggtggagctataaccatcaggacgaatggctgatcacacccgccttcaactgcccgccctcagggtatctgaacttcgactcctacgtgttcctgggatccacaaacgcagaccactactacgtgaagatctctctggacaacggaaccacctggaccgagatttgggacgcttcggctcagaccggcggctggaactactacgcctcacccatcaacatagacctgggcgcttacagcggacagcaggtcaagctggcgttcaacgccaccgatggccccgatgacagcggcctctggtatgtctggttcatcgataacatctacatcggcaatgccttgaccgccgcggccacgcctgcccaaaccatccgcttcagcgattcagacctgatcgtcaaatccgctggcacaaacggcttcggcgcccgtccgatgacaaacgtcaatccatcccgcgccttgcaaaacggcggtgtccgcaacgagcccaggctgcccttcccggatgaaatccgcggagtggcccaaagtggtcgcctgcacgtcggatacaaggtatggcgcctcacccagggcaacgaaaacaacgaagcatcctggcagtccctcactccccaagtgataacggaaaccgacctcagcgacaccacctggatttctctgccaaacggcaactaccgctgggcggtgaaagccatctacaccaacggcgtgagttctgtgccctcgttctccaacataatcgaaaagttccagtacaccggcctgatcgccggcgtggtaagaagctccagcaacacgcctattgccggagcccatgttacagccaacggcattaccgcgacaaccaacaacggcggcgcctacaccctgatgctgcccgtgggaacttacgacgtgacagcttccgcaaccggatatttcacccaaaccgctcagggaatccaggtgaacgccaaccaaaccaccaccctgaacttcgtgatggcattgcccaacgaagatgtggtgcaggtctcggcaaccgccctgatcggcaactaccccaaccccttcaaccccgaaaccaccatcagctatagcgttaaagagcccgccccggtgaagatcgaaatctttaacaccaagggacagctcgtccgcaccctggtcaaccagatccagcccagcggattctatagcgaaatctggaacggaacagatgagcgcggcaacccggtcgccagcggagtctacatgtatcgcatgaccgcgggcaactacagcagccacaggaagatgatgctcatcaaataaacaatatcaaccgcctccgccgcgtcctgcgtgcggtggctcagattacggcccccgggtttcccccgggggtttttctttgcccgggatgaaaaccatttccgggctgggaggcaactcccaatgcggcgctatagcaagcgccgccacagttgaggcagtcgccgaaccacctttttcacacgatttcatcctttctcaggattgtttgaagtccgggccggcttcaggactggcataagcatgaagcccatattgccggctcgaactccaaactcaagccagcatggagttgaaagagcctttcccgactgtaaatctccgccagacgctttggctcttttgacttcatgcgggaagaggggacacgacagcccgtgataacgcagttttttagtcttggggtgtttgtttcaaggctgggttgtcgtttctaaaagactggatcacggctcgcaggccgtgatgacacagtttttagtctgggggtggttttttctgggtctgggtggttgttttcaaaagactggatcacggctcgcaggccgggatgacgcagttttttagtctgggggtgtttgtttcggggctgggttgtcgtttctaaaagactggatcacggctcgcagcccgtgatgacacagtttttagtctggggatgtttgtttcggggtctggtggttgttttcaaaagactggatcacggctcgcaggccgtgatgacacagtttttagtctggaggtgtttgtttctgggtctggtggacttgctttgggggaacctttccacctttccacctcaaaaacacctttccacaaaatccccacaaccacctccatgctcccccataccgccctcctttgccaccacttgttttgggggtatcatccttaggtatgtggttgcaaagttaaggatgaccccaggtaaaccccaggaaatctacaggatgcaaaggggagcggtatcagggcggcgggacgggggcgggcaaacttttccttgacaggcaggcaatcccttttttgcttgccaatatcacaaataacagaggtttgcagaatggaactcctgctcgaacaactgcaattcccatcggacgccaatatcatcttggggcaaagccatttcatcaagaccctggaagacctttacgaggtgatggtaaacagcgttcccggggcaaaattcggcatcgccttcagcgaggcgtccggaccctgcctgatccgcaaggacggcaccgacaacgacttgatcgaatgcgcggtggaaaacctgctgcgcctgaaagccgggcactgcttcctgatcgtgatgcgcggcgcctttcccatcaacgtgctgaactccgtgaaagattgccgcgaggtggtacacgtgttttgcgctaccgccaatccggtgcaggtggtattggcagccagcgaacagggcagaggcatcctgggcgtgatcgacggctcctctcccaaaggcatagagctggatacggatatcacccagcgcaaaaagtttttgcgggatataggctacaagcgctgaatgaactaccgctgctttatcgcgctggaggcggttgacccgctgcgcggccatctggaggagcatctgcggcgttttcgccccaggaccggcgtgaactgggtgaagaatgaaaacctgcatctgaccctgctctttctgggcgatgtggattccacccgggtgcccgaactgtctgaaatcgtggatgaatgcgtgggacgcaggcgccccctctggctctccctgcgtggttttgacctctttcccgccaagtctccgcgcctgatctgggcaagcctggacgcgcgggacgacgaaccgcgcctgctgcacaaagacctgttgagccagacgcggcaagcgggcttcgagccggactccaagcctctgaaactgcatatcaccctggggcggatcaaaagccagttaccggtctggctggaagaggaaatcctgcaaagcgaggtggacagcgcctggcagccgcagaccgcggtgacgctttaccgtagcatcctgaagccggaaggccccacctatcatgttttaaatcaatatattataccataaggaagttaagatgctggaaaagaacaaagaagccgcgctcaagacggcgatctcgcaattggaaaagaaatatggcgtgggcaccctgatgcgcctgggagacaggccccagcaagtggtggacgccatccccaccggcgctttcaacctggatatcgcccttggcatcggcggaattccccgcggcagggtgaccgagatctacggcgccgaagccagcggcaaaaccaccctggcgctgcacatcgccgctgagacccaaaagcttggcggactggtggcattcatcgacgcggaacacgccctggacatcgcctatgccaagaagctgggcgtgcagaccgaagatttgctgctttcccagccggacggcggggagcaggctttggagatttgcgagaccctggtgcgcagttcggctgttgacctggtgatcgtggactcggtggcggcgctcgtgcccaaggccgagatcgaaggcgagatgggcgacagccacgttggcttgcaggcgcgcctgatgagccaggccctgcgcaagctcaccgccatcgtatccaaatccaacaccgccgtggtgttcatcaaccagacccgcatgaagatcggcgtcaccgcctatatgaaccccgaaaccaccaccggcggcgtggcgctcaaattttactcctcggtgcgcatggaagtgcgctatgccggcgccatccgctatggcggcgcggactccgacatcatcggcgccaagacccgggtgaagatcgtcaaaaacaagctcgccccgcctttcaggacggtctatttccccattatcttcggcgaaggcatctccaatatcgatatcatcatcgagatgggtatcgagatgggactgatcaagaagagcggctcctggttttcctatgaggatgtcaagcttggccagggcatggaaaaatccaagcagtacctcaaagatacacccgatcttctgaaggagatcgaagaaaaggtgcgcgcccaggtgagccccgaaactttgaattccgtggacaccgatgcggctgaggataaacccgaagaataaactcgcggttataatagaaatagacggcgtgaatcagggcacccttcccggaagggtgctcccgccgcgctttccggaaggttttgaaggagaggcggatagcggagagatcggagaactgctcgacctgctgcgtgccagagccttcaacctgctgctggactggctcgccaagtccgaacacagcaccctgcaatgccgcgcctacctgaaacggcaccacttccatcccagcctggcggaagaggccatcgaacgtctgaggcagctaaactatctgagcgacgaacgcttcgcggaaaccctcatccgctcatacgccaaccgccgcgccagccgccgcgcgatcatcgccaaactgcgtgaacagcgcatcccctcctccctctgggaaccgcttttggcggagctctatccccggcgggaggcctcctccaacctgcgggagctgctggacagatattgcgccagccacagcgaactgccccgcgaaaagctgcgggaaaaggcgttcacccacttcttccgcaaaggatttgaactgcaggatatccagagcgcctgggaagctttgggcaagcccgcatccggctgaaccccctccatccccctgccgcggaggccaaaaaagaaccggcgctgaacggccggtcttgggaaaatagcggtaatagcggttggtgtcaggttagggcactcatcatccccagcattgtgcctccaaagagaagcatccatgctatccagataacgaggaggacagcccagaaaatcagcaggctgatcgcccagtttttgcggttgggattgccgctgccacccgccgcccacacgatcaccataattatgttgacgacgggaatcatcatcaccagaaaggtaaccacccaattgcccacagtcatcaccggggctaccggttgcatgccaaagttggggttgttctgttccatgaagcggagcctcctttttgtttttggataattatatgcccgcggagaatgtgtcaagcattagttcagttttgtttggcgggagggctggaatcacacccccacgcgcttgcagtactggtggatcggacactcggcgcagctcggcttgcgggggatgcagaggttttgcccgaaagccaccagaaaagagttgtaattcagccagtgcctgtcgggcaggatcttcctcagggccatctcgctctccagcggggttttggtgcggatatagccccagcggttgctgatgcggtgcacgtgcacatccacgcagatggcgggcaggccaaaagccaccgcgcgcaccaggttggcggtcttgcgtcccaccccgggaagctgcagcagatcgtctatttcagagggcacctctccgccaaaacgttccttcagcacggcgggaagctgcttgagatgctttgtcttttcattgtggaaacccacctggcggatgaggccgttcagttcggcggcgctgagcttttccaggtcatccggagtctgcaccacctgaaacagcgcttccgacgctttggctgtggtctgatccttggtgcgggcgctgaggatggtggcaaccagcaccttgaaggggtctttggtctgtatctggatcaggtcaacgatgggggtctgcacgctgtggaagtgcttttccagctctaccatcaccgcgtcaatgtcgaattttgccatgttctttccttgcaaatcactctgttctcaaaataatgattgcaggttttggcagccccgctatcttgtcaaccagaaggagtttgccatgtgcggaagatttgcccaggtgatcaagcacgaccagttgcaaaaactggccagagagctgcgactcaaccgggagagccagcagctggagttcaactacaacctcgcgcccacccagcccgcgatggcggtggtaagccaggacgccaggcgatatctgggggttttccgctggggcctgatcccctcctggagcagggagataccttcctttccgctgttcaacgtgagggcggagaccatcaccgccaagcccagtttccggggaggcctgcaacgccgccgctgcctcgtgcccgccacggggttctatgaatggaggcaaagcgacaagcagcccttcttcatccacgccgcccagggggatttgctctggatggctgccatctacgacgcctggagctctccggacggcagttacgttccctcgatgggcatcatcaccaccgatgccaactcccccatgcgggccttgcaccacaggatgccggtgctgctctggggggatgaccgcctcgcctggctggaacacagccggcaggacgcgctggacttcgttcccctgctcaaacccgcgccggatgactccatcgcgctgtatcccgtgagcaaatacgtaaacaaggttggcaacaacggcgaggagtgcctgaaaccgctgtaggcttcccgcgagggcttttacggcctcagatcagaaatagcgcagcaggatgtagaatgtgcagatcagcagcgaaagcagggtgaaaatcacgctgaccttggtgaaatcccggaagcggatgtgatagccattgtgtttggctatgccgacggcaacgatgttggcggacgcgccgatgagggtgccgttaccgcccaggcaggtgcccagcgccagtgaccaccagagcggattgatgtccgtgatctgcctggcgacttcgccgatatgctcgatcacgggaatcatcgccgccacaaagggcacgttgtcgatgaaggcggaaaagatgccggacagccagaggatggccagcgaggtctcttttgccctgccctgcgtcagctccaccacgccattggcaagcatgttgatgaagcctgtcttgaccaggctttccacgatgatgaacagcccgatgaaaaagaagatcgtgacccagtccacatcgttcgtcagcacgtgttccacctttttgcggctgctgatggcaagaagcagcaggcctgccgacatggagatcgtggcggtatggatgcccagcacgctttgcaggcccagccccaccagcatcagaaccagcacgccgatggcgatcgccagctttttcctgctcttgatcaggttgtcttccttatagctaagcaggcgggcgcggttttcggtgctcaccttcatccctttgcggtacatcagccagatcaatccgcaactgaagactgtggtgatgatcgccggaggcgtcagattgagcaggaaatctatgaaagtgagattggtggcgctgccgatgatgatattgggcggatcgccgatcatcgttgccgcgcctccgatattggaagccaccaccatggtgatgatgaagggcatcggcgagattttcagttcccccgtgatcagcagcaggatcggcaccaggatcatgaccgtggtcacgctgcccagaaacgccgacacaacggctgtgatcacaaacatatagatcatgatcagcagcggttttcccctggcaagcttggcggtcttgatcgccatatacataaacaggccggtatccttgagcacggagatgaccagcatcatcccgatcaaaaagaagatcacgttccagtcaaccgcgctgaaggcctcgggttgctgcaggattccggtcagaatcagcgcgaaccctccgatcatggcggccagcattttgttgatccactcagttatgatcaacacataggtaatgataaatatcgccagggctaaaatcatcagatacattctattacaccgttataaccttgcgcaggatgtcttttgccgttaccacgcccaccagtttgccctcgtcaacgatgctcacgaaacgcttgcggtgcctgatcataagcgccaccgtttccacgatggatgccttgggatgcagcaccggttcctccgtctccatgatctcgcccaccgtggcgacgtccatggtctcaaacagcttttccaggggttcaaaagagagcagaaagttcagattgtcaatcatcatcagatagtccggcacccccaccttgagcaggtcgagcacgctcacctcgcccagatagcgcccctcctcatccgtgaccggaaccatcgagatttccttgtcactcatgaccaggctcagttcgctcaacagcgtatccgggccaaccgagacaggactggaggtcatgatatcgccgatgcagacttcctttttcacctcgatcccgtgctgtttgacgacctgcaccaccccgtgcccgtcgtgctgccgcttcatttcctccatcagcccggcatcccgggacatcttcaacagcgccgaaactatgttcagataggtattggagctgcttttgtccgtgatgatcatcaccacccaggaaacctttatatcttcagattgcaccggattctgcaaaaagctcatcgcgatcagggtgtcgtccagcccttccagacgcacgtgcgggatgccaattccgctgggataggcagtatgcgattgttcttccctctggcgcaccaggcgcatcagttccgggcagctcactggcagcttgtgatagcggcaaatcagctccaccagagcctgatagatcttgtcgagatccaatatccgctgttcgtgcaggatcagccggggatcgagaaagctggccaattgcataaagcacctcttcttttctactatttctcaaatccttttctcttcgcggatatgacgcatgccattcagaactctctgataaagcgagagatgtgaaccgcgttcaggatttgtcggactttatgcggctctgatttattccgtcaagctaaatgtacgagccgcctgaaacgccatggtctgagcgatgcccgcccagcctgcctgcaaggcacagagcacattcgtagcacctatatatatggaaggaggtgtttgaatgttcagtttttttcaggtgcagaaggtatcgccctcatttgataccagaggagttggccccatcatccttaggtcaaccttataaattataaggatgacctaaggaagacccatgccaaagagagggttgcgaatgagggcgaaatattgcccaagtatggctttcatggtctaatctccctctgcaaagcattttaccgttttcaagatagcaaatataaacataccattatatacgttccacccggaaataaggcttgacatcaataggaagatatatttttttgcaccttgatcttcggtgacccctcagtgagatctgtcaggccatcgggttcattgtttgtagcatggctgaccagttattcggaaactgtttttaggattgttggcgctactcctgtttaaaaccggttggtcctcccgcgcagacgagaaatatatgtattatatagattgtctattggcgggcaccctccagcaggctgcccatgagcggcccgggataaaaaccggaccatcggaaaaacaagaggagtaaagaatgcgacgaactctttttttagttttattcctaacggcattgttgggaatagtaggtttgagggctcaaacaacatggactgttggccccactggtgattttgccacaatacaggcggcggtcaatgcagcaagcgacggcgacctgattcaagtgcaggacggcacctacacggaaaatgttgccgttaataagaacatcagcctcacttccgtcaatggtgcagccacaactataattgatggtttgaactcaggaggagggactggcaccatcaatctgaaaagcggaaggaatggcgtggtaattggcacaatcggccacggtttcaccgttaaaggaatcgatggccctcccggtgttgaatttgccgccatctacctgaccggcgcacagaccaatatctcgattgagggcaacatcatcgaagccagaggtgacgccgccctaatgggtgaatataacgccgcaaacaccaatatagtgataaatggcaatgagatcacaggcaagaccttcgtcggggataatccgggtggggtaggatttggcgctcaatacaacttgccaaatgtaccacgccaactggtagtattcggtggaggagctggtacaaccaacactcagagcttcactttcacaaacaacatcctctccgggatatgcggaggcatgagcatcacagacaacaatggaaatccgattgatcccacgccgcaaggcaacacattagcctcactggaatttgccggaactaacaatatcattgccggcaatacgttcagcggatcgaccacaagatacgcggaagcactcaggatgaggggtcccggggaatatacgattacaggtaacacattcaacggctcatatcccgttacaatgacagcccagacttcgaatcccagcattgggctggacaggatccaaaatgctctttctccagccaatacttatagcaatcacgtggtggtaaattccggtacggcactcgcggttccagctatttttcccactatacaggccgcaatagatgccgccacccccggtcatgtcattcaagtagccgaaggaacctacaacgaaacggttacgatcaataaaggcgtaagcgttttgggggctggagccgctaacacgatcatagatccggtatcatcaacagcaacctatgttgtgaggataaacaccacttctggaaatgtgaaactcgatggctttaccatcaggaactcgactactgaagaagtaggaacaaccaaggtagcgcttggcagtggatctaccggagcaatggtagagatatccaacaatgccattattggtggatacgacagcgccactggggtctatacagatttcggtttcggcctttggagcagtaattgtgcatccaacctgtttttccatcacaacagcatcagcaattgttatgacaatcctgttgggctggaacgtcacaggggcgcgagcgagatatcctataatactataactgactgtgcaccatttcccgcaatctggttcatgaccgagaaatccggaagtgaagctcccgaaatgtatgagatcaccgccagacagtatattcatcacaatactatcacaaccggcacaggcattggtatgtccgccccgtatggtgggcattataatcaatatctcggcggcaaatacaccgatgtggagatatcctacaacaacatatcgaatctatctgcaaccggaaaaggcatccaactggaagctaatggggataacggcggattctacaatccagttatcgcatataacactataactggagcatcaggattacccacgacttcagcccgcgggataagaatactcggtaacgtgttaaacgccgatattagcaataataccataagcggtgtgtacagaggcatctggcaaagctattcctggggacagcccggtatccccggcccaagcggaaataccgcaaacaacaattcgatcaccaattgcgtcattggagtagaaaaccagtatgcaacaaccgccgcggtgttagatgccaccaaaacctggtggggagatgccagcggccctctggatgatgactccatcaatcctgatcctcaagctgacaatcctgatgggctgggcactaaagtttcgggttatgtgttgtacgatccctggtacctggattctgcaatgaccagactctccaaccagaacgtccagaacatcgacacaggcgagtggttcacaacgatccaggaagccatagatgacccagaaaccctggcgggacatactatcgaggtgcaacccggcacatacgtggaacaactgcatgtcactaccgaagacctcaccatccgtggtgttggcactgatccggtggtgatccagtcgccggatgtcctgcctctgtcgttcacaacctcagcagctaacaagccggtcgtgttcgtggatggcgtgcaggaattcacgctcaataacgtaaccgtggacggcaacaacaaaggaaacgccaactaccgcttctgcggagtcgggttctggaacgctggcggtaccctcgaagacgttgatgtgatcaacatcatgaacgatacattcagcggcgctcagcatggcgttggcgtttatgcctataataacaccaccgggccttacaacatcaaactcgaccatgttaatgtgactgatttccagaagaatggcctggccctgaatggaaacaacaacttgacagttgaccttgactacgtgaatgtcgtgggtcagggagcaacgaccgttacagcgcaaaatggaatccaagtgatgggtgcaacaggcacaatcgacaattgcaacgttagcgatgtatattggatcgatcccgatcctaatgttggcgagccttgggtggcagcagctatattgctttgcgaagatgagaacattgtcgtaagctcatgtactgtatcaaacagccaggtaggaatatatagttatgatagcaatggtgttaccataaccaacaatagcgtttccgggacagatgaagcaataatagctcatggaaccggattcgttataaatggaaatacactaacagacaacctgatccatgttgccaattacaccagtgatttggacgtgaacacccttgtgcctactgtaaatacatatctccccacatacatgatagttgaccagattatctacggcaacgcggcgttactgtatgttgacgtgcccgatgaagtgatccccaatagcttccaacagacctattcagtgaaagcgtcgtatatagaagacctgcgtgctttcaccttaacattgaagattcccagggccgatttcgtacagcctgttcatactgggtcaaacatcgatttcgcccttggcagcgcctacgatcagtacaccttcaagatgatacaatctatcctgtttgacgatacagatcaagattactacctctataccattaccggcagctatcttggcgcttcagacggcattaccggcgcggacaaggaactgctcacggtgaaactcaccagcaacgcggatccacacacaaacgtgcctaacggctgctatatcgtgattgactacgactcagtaatcctcaaggacgaccaaaatccttaccatgaaataccctgcgccggtaccgttgacggatgggtgctgatcgacagcgaagctcccctggtcgtgatcgacaacatcgcctcctatcccgagccatatatggttcaggttgatggcgacggcattatcgaacccgtgttcaacctcacctataccgacgactgggatctggctacagccatgtacctgatccaggctgaggatgccacagctccggacgatccgggcgatttcaccgcggtcgttggcgcagtggacggcaccctgaccgatatcgacaactggaccctgcccatcggctccctggctgatggcacctataccgcgtatctgctggtggtggacgaagctggcaactactacatcctggattgggatttcatcatcgacaccaccggtccagccgccgtggtctgggaacctcagatgaccgctgaactgcatccctgccgcaccacaccaaacgcgaacaactccatcgacctgatgtggaccaacaccggcgatgtggtgaagaaccatatctggatcctgagctacggcgacgccatgggcggagacgctgccaaccactatccggaatatgaaaaccatcaggaaccagcttcgatcaccgctcccgatccctatggcgcgagcccgcagaacggctgggtgaaatataccgtcgatcctgttcccgccaccttcccctatgccctcaccggcatggagcgcggctattactacgtgaccatcttcgcgcaggatgccgcaggcaacatgagcgaagcccccgaagcccccttctaccgcgagtccatctcctactggcctggcgacgtggtgatcgaaggccaggttctggataacgacgttgccattctaaccggagcctggggacgcggcgtgaccaccgacctgccctgggatgacacttacaacgtcatcgatgtgggaccctccacggactatatgcgccgttcccgccccactcccgataacaagatcgacattgaagacctgatgatgttcgccatgaactacgacaacacgaattatacctattacatcaggaacttccctgaaatcaatcccatcgagatcagcctgaacagccacagcgctgccggccagcttgtcgtggaactggttctggacggcaacgccggctttgtgaaaggcctggatatccccgtgagctatggcaacggtctgcatctgcttggcgtagccagcggcgaagtgtggcctgaaggcagcctgctgctgcacaccaacgccgatggcagggtcactgtttccatagcagccatgggagctgacgcggtcgtggaaggcaacggcgtgatcgccaccctcaccttcgccgtgaccggcaccaacaccgacctggctttggaacacatgacagcccgcacctgtgataaccaggaaatcgagatcgaaaacaatcccaccggcgacgtgaacaacggagacgtggtgaacgtgatccccgcccacagctatctaggcagcaactatcccaaccccttcaaccccagcacaaccatccagtttgggatcaaggaagcaggatatgtgaagctcaaagtgttcaacgcccgtggacagcttatccgcaccctggtgaacgacagcaaggctgccggaacctaccaggcaacctggaacggtttggacgaaaacaaccgccccgtggcctcgggagtttatatcttccgcatggaaaccaagggtaaagtgcagaccaccaaaggtatcctaatcaaataaaagtatcaacaggagttcgccccccacggggcggactcccccttttagggagaaagaatgaagtccagattctgcctgtctttgatgctgctgatggcctccctgggcttgagtgcgatctctgtgagcatcacacccaatcccaaggtgacccaggcgcagcaagaatttactgtgcacgtgactctggacacccccaccgtgatccgcggttgcaccgtgtggttcgaatacgatcccgacaagatcgagtatcagggcgccgagattggagaactgctcagcggatttgcccaatactggtttctgagcgtcagggaaagccccaccaggattcgggttccctgcatcattatgggggcagagctgtatgtgaccgggcccggtgacatgctcaacctcaattttaccgccctcgccggagatttcagcagcatagacatagtgaatattcaactttacgacgtgatcggctatgagataccgggtgtggaagcctttgacggggatgtgatcatcggcgactgcgccgcctatgggcggatcaagtgctggctgcagggggcatactccgggggtgccatgctgacaacccagaatgcggagattcccctcaattcaccctatcccactgcccccgcctgcgtggattccattcccggggatgtggtggactggatgctgctggaactgcgctccgtccacaacggccagcccgtgggcagttattcgttgtttttggacagcggcggctacctgcgcacgcctggaaagccatatctgatcttgatgaacagctctcctggaccatactatctggtgctgaggcaccgtaaccacatggccattatgagcaccacagcccagactctgagcagcagcggaagccccgccgtgtttgacctgaccgatattgcaaatatctatggcaatggcgggatggtagaggtggaggatggtatccacgcgatggctgcgggagacgccgatgccaacggcaatatcggcgcggtagaccgaaatgcccactggagagagcaaaccggcttgaacggctatctttccgcggatttcaacctggacgcctatgtttccacggttgacctcaatgaattttggcgtctcaattccggtttagtgagcactgtcccgcccgcggaggttaacccatgatgaaggctggcggtttcggcaggatgctcctgtcatgcacaatccttgccctgttatgccttgcgcctctgacagcccaggctgccccgccgcggcgttctggtttccagggcactatcgagttcaccctgtctcccgaagtggtaagggtgaatggcgaaagctttctttccctggatattttggccagcagccccgacccgaatcagaggatcggctccgggatggtgcaattgaactacaatcccaccctcttcgggcaaaatgtgaagagcaacggcaacgcggcagtcacgtacgggagcctgatcaacgcggttccctttccctattacaatctcatcatgaacgacaactcccccagcaggctggccatcaccttcgagtatctgatgcctgccggactgggcggaatgctcacctccacgccccaacaactgctgaatgtgaggctcaggctgctggacaccagcttcccctgcggcttcagcttccagcaaaacctgatggtcaaccagcagtatctggatgacaaccacacccggttcgctcaagtgctggccacggacacagacaacaccctcgtcccatcgcagcccaccggactgtgtctgagcctgcagggcaacaacctgcaactgaactggcaagaagccagcggttgcacctactctgtttattccgcgcaagaccccaacgcgggagactggcagatggtggcatccggactcacagaccccttctggagcatccccatccaaaccaaccgcatgtttttccgggtcaccgcctctggctatcccgataccaaatgaaggaggaaataagtgctgcgacgcatgacagttaaagcgattttgttagtattattcggaatcctgattgtgcacaccgtttccgctgagatcagagtttatatcgatgaacccagctataacctgtcctactttgagcccgtcactctggcggtgaaggtggaagggctgaccgcgcaagaagccctgcgcggcttcaaagtccatctggattttgacgaaacctatctggaaatagcggatatctccgcctttcaggaagggcctttcctcagttccttcggccctacccaatggtatgcgctcgaggcggaccaaggctacatcataacctgttccatcatgggctacactcccggcgcgaccggctccggcactctgttcacagtggacctgaaagcaaaaaaccaatccaccggaacaaccggaaccgatgtgacgctttcggacatcattctgcgcaatccgctcaaccagaacctgctcttcagctccgccgactgcaacatcgtgatcaaccccggcgtgatgatctatgtggagcccgcccaggaatacatctattactacgatcaggtgaccctggccgtcaacatcgagggctctcaggatgtctccctgcgcgggtaccaaatccatctggattttgacgacacctatctggaaatagcgggtatctccgcctttcaggaagggcctttcctcagttccgttggctccacccaatggtatgtgctcgaggcggatgaaggctatataatcagctgctctatcatgggctacacacccggcgctttcggctctggaacgctgttttacgtgacgctgcaggccagggaccaatccaccggcccgcaaggcaccgacgtcaccctctccgacatcgtcctgcgcgaaccgctcaatcacaaggtcaattacatctcacaggacggcaacatcgtgatcaaccccccgccctatatctacaccggcctcaaggtgtttctgcaaggcccttacgtgaccggcggcagcatgacccacatcctgagcgacaacggttacctgccgctcacctcgccctatgacgccaacctcaccctggacgccttccccgatgtgagcccccgccatatcgtggactggatcacagtgcaactgcggcccagcctcaccggcgccgaagaacaactgcaaaactgcttcctgctggacgacggcaccgtagttgacctgaccggaaaccccgccctggctttcgactacagcggcagtttggaatactacctcattgtgcgccatcgcaatcacctggaagtgatgtcggcagcgcccatcaccttcaccccctatccgcagaattactcccctgccgatatgaccctgttgaactctatctttggaggaaacgtccacggagtaagtgaggtcgaggcaggagtgctggcgacctgctccggcgaagcggatcaaaatggggttattgcaagcccggatgcaaatatctggttcactcaggctggattgctatatggttacttcacttccgactttgacctgaacggcgtagtcaacaccattgacctgaatgggttctggtatactaccactggcaagatctcgcaaataccatgattaataattataaggagtataaatgaaaaggctattatgtttactggtcctcctgatcccagttctcctggctgctcagtttggagaaccaggggatgcgggaatcctctactcgttcgccaacccacaaatcacccaagagggcggcatctcctactttgagtttgacctcatggcccaggccactccacctgcgcaagacaatctgaccaggatcggggatggcaacatctggctttacttaaatacggaagctttcggcgaggacctttataccaacgacaatgttactgttacacgtggagaacttcttgcaggagcaccagtatctttctatcgtattcgtctcaatgacacagctgacatccaccaaacgccagctttgtacttgcttgccataacctacatatacaatttccccccagaagatgaagagtatgcaaatctcctgcccgcaaccccaacccaactcatgcatcttaaatttaaaatcctgaataccaaaaagcaaccctgggtctgctattggatcgatgaaatgccctacacatctttttacagcgaccattatacatattatgagccagtcacagtgagcgaatgcctctattaccaaactcccacgccggtggtgctctcctccttcacggcttcgctgtccgcggaatcctatgtcaagctcacctgggtcacccagtccgagaccaacatgaccggctattacatcctgcgcggcacttctgatgacctgaacagcgcccagatggtgagcccgctgatccccgccaccaatacctccaacatgcagacctatgagttcaccgactccgaggtctatgaagacggcgtctattattattggctggaagcccgcgaaaccggtaccagcagcttccacggccctgtgtcgatcgcgttttcgtccacctccacgacgccggctaccattcctctgcagacggccctcaacaagatttatcccaaccccttcaacccctatgccttcatccccttcagcataggcaaggacgccggccccacaccggtgagcatccagatctacaacgcccgcgggcagatagtgtatagcgatgacctgggcatcaaaaaccccggcagctacaaagactacgtgtgggacggcaaggatttgcaaggacgcgactgcggcaccggaatgtatttggtgcgcatgactgcaggcaaggccagcttcacccagaaagtggtgatgattaaatagatttctccatccatcctgatcactaagtaaatgcccggcctgaaaaccgggcatttgcattgaatccaatcaactcttctctatccaaatccttcccaggactgactcacaccctactcgatcgcatggcctgcaagccgccatcttatgccgctgtcgcgagaggctgctcccaccgcctggagtgcaaatccaggccccggtattcgttttggatggtgtcccaggcaagctgctggaggaggtaagccgtggcggcgtcgatctgtgggggaaaatacctgttgcccaccgggttgacattccagatgcgggccagcatcaggcaggccaccaaataggtgccgtagatgctgggatggtaattgtccacttcgtagagatttggcatgccggggagggaactggcgttgtaccacgccacacctgccggaaccacaggggcatccagccaggctccgatataacggtaggcatctctgatcggcacatacatttccgggttgttgcgccacgcccaggtcatgtagaaaccggtgagggcgcccgcctggtggatcagggtgttcagcgaatctgcatagctgtaaaagagttccggattcagcatggggcggctgctctgttcctggaggatcaccaggtcccaatctcccgtggcgatggcggtgagggtgtttggatcgtgaaagtggttttccagggtgtatccgccgctggttctggcgttcaccaccacgttccattcggggtgcgccatgtcgatcagggcctgcagatgagtgtccaccccgtcattgaagtaggtgtggctgtttcccaccagcaggacgcggcggctggattcatagggaagcccccatcccacaaccacttccagccctccgggaacgaactgcagggtgatgtgaaccgtggtggtctgagagggtgagaccagcccgctgccctggccggtggctatcagggtgaggccgtcaaatacctgcacatcgatggcgtaaacgcccggctccaagtcctgcaaagtcccctctgccatattgccggtgattacaaggtccatgctctggctgtaagaacctttgacgatggtgactgccaccctcgagacgttgaaattgagctgggctgccgggctgaggtccatgcggatcggcagctcacccgtctgctcgggaagcgtggaaaccgagttgcagcctgccagtaacagggctgccagtaagctgaaaatgactaatctgggcattttggctccttgaatgaacggattggttatctctcgcgttttcaaggcaatctgtcaagagaaatccgattccccacccggcaagttacttgacagaaatggacatttatttataaatgcgaccgtgcttacaggttttttcccaaaagaaacctgacacaatcagttacagaatggagctaaaacatgccagacatagaactttcaatagtcacccaggcagacccggaggcgatccttgccctgtatcgccacgcgggatggtggcagaccgatgacaatcctgagtatctgaggactgtggaaaagataatcgcgaactcccactgcttcgcgattgccacccacggctccaggatcatcggcatgggcagggctatcagcgacagggttagcgacgcctacatccaggatgtgacggtacacagcgactaccgcggccggggcattggcaaggccatcgtgcgcaaactgctcgaacgcctgcgcggggacggaatgcagtggataggcctgatcagcgaaccgggctacgacaggttttacgaagggctgggctttgcccggatggagggatacacgccgttcctgctgaaacaggactaagcgcgtcacagtatgctaaaactcgaagctctcaccacagcccagattcccctcctgcgcgagttcctcatccgctacccgcgccagtcctgcgactataacatctgcaacctcctgagctggggcagaatctacaagaaccagttcgcgctctgggaaggccatctggtgctggtcaatccccaatactcctatctgctctaccccttggggccgggattgggcgcggacaagacgagggaactttttgacctctaccgcgaggacgccccggaggcgaaactgctgatcataccggaagactggcaggaaagctgcccgggcctggacaggcactttgagatccgcggcgatagggactgggacgactatgtctattcaacggaaaaaatggtgaatctgagaggtaagaagctaaccaagaagaaaaacctgatttcccagttcaggcgtgcctatccgaactatcatgtgctgccgataagcagggaaaaacacgaggtgatcgagcgcttcaccgagaaatggcgccgcgagaggcacgttgaaggcagctatctggacaccgaaatgaaagccatccaaaacaccctcgagatgtgggacgaactgcccgtggaggggatcatcgtctgcctggagcaaagaatcgccgcctattccatcttcagcccgcagacgcaggacatggtgacggtgcacttcgagaagttcgaccccgacaaaaagggcagcgcgcagctaatcaactgggaaacagcccgctacctgcaatcccgctacaaatggattaaccgcgagcaggacatcggcctcgagggtttgaggcaagccaagaccagctatacgccggactttatggtcaagttcctcgcgggaacgccaaggtaagcagccacccgattcccacgcatcccgccagggaaagcaggaaggcggctatccgcctggggcgcggattgtaaaaaagctgcaaacccaccggcaacaggtcgtgagcctgccagcggaaggcgtattttctaagcttcggatggggtttgatccggtttagcttcctgagataggagatgtgtagctgatggtaattacggctggcaatgttgccattcagatcgtaataactgaaaccgcggtaatcgaacccatccagcttggcaagcaagcccccgtatcccgcttcaaacagcccgcaagcctcttcctgcccggtgattttgtatgtgtcccaaaggcaaagcaggatcgccatcatcccgttgagcacaaagggttgcccctcgccaggatattcttgaaaccagagggagccatccggcaagcgctttgtcaggctgcatccgggcgcgagggtgcgcattgccatgacgctgtagcgcagccagttgtcctcgccggtcagttcataacgcagggcaaaggcgagcatgcttctggcctgcgccaaagcgctgtaccagggagcgcgcagccccagcctgggcagatcgaagcgatagggaatccacagccttccctcttccgtctcggagtgctccagcagccaatcggtgagcctcagaaagctttcatgcctggctggatcagtcctgcgccaatagtcccggttggcttgccacgccacgaagaggggattgtattgcaagcccagatcacggtaaagctggacggggatgccccgctcatcgaatctgcgggtctgattgaggggcttgccggtcagcagcgcgaccgctctctccccccaaacctgcattttaggctcggcagcctgccagatgagagcgtgggcgacgacagaccagaggcgcggatcgctcagcatccatccctccggaaagccctcggaagcaggctcagcaaaaacatggcaaattccagcaccacaacgctcgcccccgtgggcaggttcagccaccaggaaagggcgaagccgccaaaggatgccagcagcgaaaaggcaacgcagaacaccaaagccctgtccaggcggtcaaccagattgaacgccgccgccgcgggcaggatcagttgggcgctcaccaggatgatgcccgccgcccgcacgttgatcacgatgttcaccgccagcaggatcatgaacaggcggttgaccaggccggcgtgcagacggtaaaaccttgccagttctggattgtaggcatagtaaaagagttctttgtaaagccccaggataaaggccaggttcagcacggccgccgctcccagcagccacagatcggtggaattggcaagcagcacattgccaaacagatagctggccagatcgaaggtgtagcctttgttgagcgagatcaggatgatgccgatggccatggacacgctcaggaagatggtgatggcgttggcctcctccagcctctggcggcgcgagagccaactgattgccaggctcacccccaccacaaccagcatggcggtgaactgcatattccagcctgccaggatcgccagcgcgatgcccgcaaaggcaatgtgggaaagcgcttcgcccatgtaggaaatccgccgcagggtcacaaagggcgaaaatagcgccagcgagagcgaggagagcgaagcagccgccagagcgcggatcagaaaggaatattccagcatcagtagtccttgtcgatcagtttcaccgcttcgccgaaggttttacggatgatctcggcgttcaccagttcggtcttgctgtggcagtgcagtttgcggttgaggcagatcagcgagctgcagtgttcggaaagcgtatgcagatcgtgggaaatggtgatgatggtcttgcctgccttgttcagatcgttcagcaaggcaaagaagctctgcacccccggacggtcaaccgaggcttcaggctcgtccaggatcagataattgctgcgcgagaccagcgtccgcgccagcagcaccctctgcaactgccctccggaaaggcttcccaggcgtttggacgccagttctgccgtgccggtggtttccagggcagccagggcgcgttcccgatgggattttgtgaatctgcctcccaggggcagttccgccgccaagcccatcagcacgatgtccagcgcggaagccgggaaaccgcggtcaaactcttccttttggggcagatagcccatcggattgtgccgcagccaatccaggtgcacctcaccatcgatgcggatgctgccgctctgaacgggcagcaaacccaggatcagcctgatcagggtggactttcccgccccgttggggccgatgatggccacaaactccccccgcgtgatctgcaagtctatgtcttccagaatcaggctgttgccgaagcgatggctgagcccccgcacctcgatcatcgtatccccctcattccaatccttacctttggcttaggacaaccttaggtcaaccttataatttataaggaatacctaaggatgtctccccccggggttaagggttcaaaggagggccggatgggaaggcaggcggaaaaaggcggaaacatcattcccaacccagctttaacccctcccagttgttgaggataacgtccatgatgctcttgggcttgaagctgtgccccagcggatccaactgaacgatggtgaggtcgaactcactggccagggcgcgcgccgctttgtcgctcatctggacttcggtgtaaacggctttgagacggtggcttttgaccagcgagccgatgcgagccagctcccggggagtgggttccttgccaggggagctttgcacggtgcccagatcctcgatgttgtaatccttgagcagataatggaaactgtcgtgccaggtgaccaccggggtgcgggtaaaggtgctccgttcgctctgcatgcgcagatgcagggcggcgaggtcggagatcaggcgtcccgtgttttcgctgatggtggttttcaagtggggaaaacgcgtctgcaactgatcggaaaggatcagggtgatgtgggtcagcagccggggcgagagccagacatgcggattggtctcatcttcaggaatggcgtgctgctgccggagctgatccccgatcttcacatgcctgtcgcccaaggcgtcaaaagcttgccccagattagtttccaggccaaagccattggatatggcgagggcagccccgttcaaggcacgcagcccggcaggctttgggctgaaggtatggggcgagctgttgggcggaatgagggtgaccacattcaggctgtcgcctgccagttgcctcaccagtaattcatagggatagatcgacaccaccacggtctcccgctggtcccggggcgagccggaacaggccaggagagccagcagcgccagtgatcccaacagcaggggcaggattctgcgcatgtgcctactccatctcacgcagcagttgggtcagcaaacgcactccaaccccggtggccccgtgggcgttgatgccgctttccctgtccttgagcgcggttcctgcgatatcgatgtgcagccagggtttcttgtccacaaactcgcggatgaacaggccggctgtgatcgctccagccagaggcccgccgctgtttttaaggtcggcgatgtcgctcttgatcagatccagatattcttcatgggcgggcagttgccagataagttcgccggtgaagtcggacgcgtgtttcgccttgttcaggaaggagtcgctgttgctcatcaccatcgaaatctggttgcccaaggctcccacggcggctccggtgagggtggcgatgtcgatgaccttggaaacatgttccttgctgatcgcgtaatggatggcgtccaccagggtcaggcggccttcggcgtcggtgttgttgacctcgatggtctttccagccatgctgcggatcacgtcgccggtatggtaggcgtggccggagaccatgttttcacaggcggcgatcacgccaaagacgtttactttcagtttgagggtggaaatcgccacaaaggtgcccagcacggcggccgctcccgccatgtcgcttttcatgttcaccatgccctggggggttttgaggcagtatccgccgctgtcgtaggtaagccccttgccgatcaggccgattttgccgcgggaatcgggattgccgttgtaggacatcaggatcaggcgcggttcggcggcggaacccctggcaacggcaaggaaggcgtccattttgatgcgtttcagcttgtccggaccaaagatatcgatggaaaatccgtatttgagcgcaagcttgcgggcagtctccgccagtgtgtcgggattgaccacgttggcaggttcgttcaccagatcgcgtgccagattggtggcgtcggcaaagatgcggccttccaggatgccgcggttgatgtggcgggtggtcttgagttccatcgccagatgcaccgcttccaggctgcaggctttggcgtccgcctggtatttgttgaatttatactctgccagcagggcggattccgccaggatgtggccaaactgcacatctcccagggggttggcaaaggcgggaaagagatagacttccttgccgtccagcttcatcaccgcgcgcagggcattggcaaacagggttctcagtttcgcgccgttcaattccttcacgttgcccacgccgcagagcaccacgttgctgcagtgcttgggtagcacgatggggaagctgcggattccgttgaactcaaatttgaattcgttttgtttcagatagagctggatcgcctgtctgacactttcgggcaggtattcgacactgtccagatcgcctttttcgtccatcataacgatcacgctttccatgttttcggtaagcctgcgtaacaagtcgattttcatcgttgtctcctcgtatatatcttaaattatctaaaaatcttcgctcaagctcaggtaataagtgggctttgaggtcttggaaagatcggtctgccaggcgatgtcgaaacgcaaaaccacatagcccaggttgaggcgcggcccgaagccatagcccagtttgaggtcatccagcctgccatcccccgtggtggcgttgaagtctgagaaactgtcgaacaccgttcccaggtcggcaaacaggctgccgcggatgttggggatgttgagcgggatcgggaatgccagattgatatattcaaaaaagggaaagcggagttccgcgctcagcaccgcctttttgtagccgctgaggttgtccctgtaggccctcaccccatagtagccgctgaggttgaagcgctgggggtcttttcccgtgctcactccggctatggcacgcaaagcgatggcgtagcgccggctgaacagggtgtagctgcgcagatcgatgtagttggtgaagtattccacctttccgtcggcgagggtggcgctcacgttatacatgccccgccagcccacaagcggcccggtggagccatagagggcgttgtcgtgcaccagcgaaagccccggggtgtaaacaagattctggctgaggctcacctcatcgcacagttcgtagccctccacatagggcgcccaggacaggtattgaccgcgctggtagagcatgtggtcagactccagccgggtgaagcgggtgaagggatagcgcagcagcatgtagaggccgctcttgcgttcccggtaacgcaacaaagtgtcggtaaggccaccctcctccagatagtaggcgtcgtccacgaggttgtagataccgatcccatagtccatcctgtgcttcaaatacagataggtgagcaacaggttcgattcctccagcttacccgccacgccgacgttgacgccgatgccgtggttgcccatgatgtcgctgaggccaagctccacatagccgatggttcccacggcggaggaatatgccaggccaccccagatgctgtccaaagagaagcggggcctgtatccgcctattctgggaggattgtctttgccggtgggacggtcgtcatagctatagtcccgggtgagaaacagggaatcctcgcgggtgagctcaaaggggcggtattccccgctgatggggaagcgttcgtcatactggcgggcggggtttatcctgcgcagcggagtgagtttgcgcttgccaaagtagtccagttgcccaaaatccacccctgccatgaggtctggagagggggtggaaagctgttgcgcggtgctgtcgctccaggccaggtttttcaggggatcgtgggcaaagtagatgttccacgccttgttgaaatagttggaaaccagcaaatagcggttgtcatgggagatatccgcggcaaagacacccgccagcacatcggtcaccttcgcccgggcggagctttgcagatccagggcgtggaggttactgaccttgtcctcataggtgaggtagagcagcttgccaccagtgccgtcaaacatgggccagctacagtccctgatcccgaaagtcagttgccgtggcaccccgccgtccagacccaggctgtagatattggcgaccacattggcaaagaagcccttgcggtgggattcggggttgaggctgcgctccgaggaaaagacgatcgtctgcccatcgggggaaaacctgggctgggcgtcgttgaaatagtcatccgtcaactgcctggtctgcccggtgtccaggtcgtggagatagatgtcgcagcgcatttcccgctgtccggcaaagaccagtttttgcccatcgggagccacatccagttcatatatcgcgtcaaactccggcagtttgaccgtctgcacgatctttcccctgtccacgtccaggatgtggatttggtcgccccaggaggtcttggcggaaaaagccacccgtttgccatcgggaaaccagctcaagttggagcggaagtaatagaactcctcggctttgccggtggcctccccggtgaatatcttctttgccctgtccatttcgtggattccagccatccacacgctgtagcgcgccccggcggtggaaaaatagacgtagcggtcacccttgggcgaaaagcggggcataaagttgaaataggagccatccttgtcggagcgggtgcgttgctccatggcttcctggggcactccatggtcgttgacgcggggatagaagtccctctttagctgaaagcgccagcgggattccaggctctcgaaatcgatgccaaagactttcttggttgccgcgtccagattgtttgatgagtggatggtaaagtagtagtccgacaccttttccctgccataggtcttggcgatgtaggccaggaagctctcccccagccggtaggcaaaatagccgtccgaattgcccagcggcacgaggtagtcgttgaccaccatatccaggatgaacatgttgttatagtcgttttctccgccaatggagaggaactccggcagcccttccgaaaaccagaagggaaaggacacaggccggagggacaggtaggagttgatcatgcctttgtccaaagcgttggcgtaggcatgggttagctcgtgggcgatcaggtcttccaggttgcggtagctgccgtcgaaggggatcaccaccctgttgcgcaggctctcggtgaaccctcccacgccttccgtgagaaggggatagatgatattggtgctctgaaactggctcttgctgcggtaaaagatgatcgggatgcgggaggagatgggatacttgaggtctgcccgcaggttatagtaggtctcttccgcgagcagcgccgccaggcggccgaagtcgttctcgccccggggaaagtaaacatcaaagtgcatggtctggagggtagaccacgcctcgggtgtggtgttgaccttgttctggccaaagttgtaagcatggcacaaagcggaaatcagcaggaaaagcaaggcgagtcttagtttcatcggcatccttaaaagagactgaacttcacatatttcttgggatgggcgcggatatccagcaccagcgagtcgagattggcaaccgagcgcgacagcttgtggtacagggcttcatcgttcagcagcagtcccgcgctgccctttccgctattcagcgccttgacggtttgggaaaggttggcggaaagcgctttgaggctgtccagggtgccgctcacgttttccagtgcctggggagagcgttgcagcaccgtgttgatctgctcctcgttggctttggcgacgcggtttatccgctccgagagcgaatctatcttttgcagggtggccgccagccgcgccttggcatcctgggaaagctcctccactgacctggcagcgctgccggcatcgtccagcaggccggaggacttcgcaatcaatccattttcccgcctcagctcctcgagcaccgcgttgaactctcccagagtggcgttcgccttgcccagcagggccatcactccgctggggtcttcgccccgttgggccttgcccagatcgagcagccccggcccctctccctgggcgatgttgagcaccgttccgcccatcaggctgctgtccgagatgtaaaagaccgcgccctctttgaggccgagcccccggttgacgcgcgccgtcaccaggatgtcgtccccgcgggccgcgatgctcttgatgcgccccacttccatgccccggaacatcgccttgtcgcccacttccagccccatgacgtcggtgaagcccacctgcaggtcttgctgcgaacggatcgagatgcgcttgctcagccacagatagccaaacacggctatgatcagcatgacaaccgtgaacagcccaaccttgagctgggtctgatagagcttgggataaaactttgccatcgcgcgtcctcaggtctttagctgtttcttctccgcggcgggaaagaggatgttgttcaggatcagcctgtagccgggagaattcttatggagttccaggatggtttccgggtcgccaaccttgtgctggtaatcctcgggatcgtggcctccgtaaaaggtgaaagtgcccttgccgatgttgccgtggatatacttgacctcgttttgccccggcacttccgccaggatgatcacgctctttttcaccttgtccttaaagaacgatgtcgtctgccccaaaaagccgttgatcacattcgtatggcactgggtgagcatagtgggcacggggtcgtatttggcggaaaagtcgaagagctgaaagtagtccgcctccgctcccctcaggcgggagtagtcgctggcgtcgatatcggaaaactcgtattcgtagggattggtcttgagggtgaagttctcgaatgcgaagcagcgctcatagttgagcttgcttttatattggggatcaatgccgtcaccgtcgatgagggagtccacgatatccaccccccgcgccgccagggcgatgtcgaaggtgtccgtgccggcgcacatggcaaagaggaagccgccgttcatcacaaattcctcgatcttctgcgccacggcatgcttgagctgccacaccttggcatagccgtgtctggcggccatcgcctcgttggtgcgcacatcgttctgataccagggcatgtgcctgtaggagccgtaaaacttgccatactgcccggtgaaatcctcatgatgcagatgcagccagtcataatctcccagtttgccttccagcacctcgtcatcccagaggcggtcgtaatccacctgggcatattccagggcgagggtcacggcgtcatcccagggcagggagttgggcgggatatagatgccgattttgggctctttctccagcaccacagcttccatattggcgtcctggatctccagcatgatggcggccacctgggaggacgacacctgctcgaagcgcaccccccggatgttgcacagcgcggaaatctccggcgcgtccgggatcaggaagctgccgccccggtagttgagcagccattttatcacatgctgctctttgagcgcttcaaaagcgactccataggccttgaggtggttgctctgcgtcagatccatggggatcagaatctcagcccgcaacccggcgctcagcagcaaggccagcaacagcgtcaggagcgtgattcggggcagtcggtgcttatgtatcgtggtcggtattcctttgagttttttcattccgtaaaatttacctttggagtaaccaaaagcctgcaaacgaggtatatgtgtcaaggattttctttcccgccggacgggatttccgcccgtgaacccatccccacaatcgcaagtttctctcgcttgggcaaatgggaatcccgcttgccgaggcaggtctttttgcctgcacccgcgcttgtccggctgccgcccgggattttgtccttgacataaaaatgcgccattttaagtctggcagcgtcatcgagcgaccaaatctaaacctttggcaggattgctcgccgtcagggtatatccggaaacagatatgccttccagtgtgaaaaggtgacacgcaagcaaaccttcatttttcctgcgactggcgcagtgtgtctccttttccaagctgaaaaaaccaaaaatgaataaaggagttgaagatgtttttcactgttgccacacctgaaaatgaaccgatcaaatcttacgcacccggaaccaaggaaagagacgctttgaaggcgaagctggatgaactcggcagccagttcatcgagatacccgcgattatcggcggcaaggaagtgttcagcggcaacaccgccgactgcatcgaaccccacaaccacaagcacgccatcggcaaataccacaaatgcggagaaaaggagatcgacctcgccatccaggcggctgtgaaggcaagcagggattgggagcagatgtctttctaccatcgctcggccattttcctgagagccgccgaactgctttccactaaataccgctatctgttgaacgccgccaccatgctggggcaaagcaaaaacgcctatcaggccgaaatcgactccgcctgcgaactgattgacttctggcgtttcaacccctattacgcacaaaagatttacgaacagcagcccctcatctcccccaagggagaatggaacttctcggaataccgcgctttggaaggctttgtgttcgccatcacgcccttcaatttcacctccatcgccggtaaccttcccacagccccggcgctgatgggcaacacggtggtctggaaaccttccggaaccgcggtttacagcggctacttcatcatgaagatattgatggaagcaggcctgcccgctggcgtcatcaactttgtccccggctcgggagcgcagatgggagacctggtcaccgattccccctacctcgccggcatccatttcacgggaagcacccaggtgttcaaccatatctggaagcgcaccgccaacaacatccacctctacaaatcctatcccagaatcgtgggcgagaccggaggcaaggacttcatcttcgcgcacgcttccgcggacatcaagaccctggcggtggcatccctgcgcggagccttcgagttccaggggcagaagtgcagcgccgcgtcccgcctctacattcccgacagcctctacggcaaatggttcgaggaaatcagcgccatgctcgcgacggtcaagatgggcgaagtccaggacttctcgaatttcgtcaacgccgtgatcgacaaaagcagcttcacaaagataaaggaatacatcgacaaagcccgcaacgcgtctgacgccgagatcgtttggggcggaaagtgcgatgacagcaagggctacttcatcgagccgaccatcatcaagaccaccaatcccaagtttgtcaccatgcaggaagagatcttcgggccggtgctgacggtctatgcctaccccgaaaaggagttcaccgagaccctcgacctctgcgacaaaacctctccctatggcctcaccggctccattttcgcgcaggacagaaccgcgatctccgtcgcctccgaactgctgaagcatagcgcgggcaacttctacatcaacgacaaacccaccggcgccgtggtcggccagcaaccttttggcggagccaggtcttccggcaccaacgacaaggcgggatcggccatcaacctctaccgctgggtttcggcaaggtcgatcaaagaaaccttcgttcctgccgacgactaccgctatccctttatgggctaaacataaaccacataactggagacgggatgatcaattcgtcccgtctctttgttttgccattattcatgcttcccctgtcgccacagcctgacagcggtgtgaaaatatgctgtttttctaatgccgtctgccccatgcagttagaatctgacagccagacccttgccaattattgcgcccgcctgaaacaactgccgctcccatttgacggggtgggctaagtctatattttccgtaggtcaaccttataatttataaggatgacctaaggatggtggcagcaaatgcaggagcagcgcgggagggcgctatgaaggaatttgcagaatgttgctggtgttattggtgaatgtaatactatattgtttgcgttttactctctccatagtgaaaaggtggaaaggagaccttcgtggtgaggtggtgtcgtggtgacgtgttgatggtggacgcagcccagcacaagtccaccaggctacataccgtgtcatccaggcctgcgagccgggctcctttagggtggcaaagtccgtttgccacagagaccggaggtctcttccaagcaggcaactccgttgcctctgccgatcagacttcggcagcccttatattatccacgtgaaccgcaggcaagccaccagaccccaaaaccgcatccttccatgcagaaacacccgatccagtctgtgttaaatacttaccaataacataaatcattcgtaaggaaactattttccttgacacgtttcttaatagtgcaataatgtgtcccgactaaaaaaaggccttatggaggcaaaaatgagagcattacaaatctttgtattgtgttgtttgctgctctgcggagcggcggttttaagtgcgcagacgccacaatggctgtgggcggttcaggcgggagggccaacaggaggatggggtaattatgatgatgggacttccatagccaccgacagccagggcaaccagtatgtcaccgggtattttatgggcacctccactttcggcagccagaccctgactgcaggcggaagcactgatctcttcgtagccaagctggatcccaatggcaactggctctgggtggtccaagccggaggggcaaacgggaatggaggttgttggggacgtggcattgccgtagatggcgcgggtaacgcgtatgtgaccgggcagtttcatgctacatataatactccagttactttcggcagccataccctgacaagcgcacatggtgatatctttgtcgccaagctggacaccaacggcaactggctctgggccgtcagggctggaggaagcggtcctgacgaagggtttggcatcgccttggatggcgcgggcaatgcttatgtaaccggggtttttgcgggtgcagccaatttcggcggccataccgtgtcgacaaccggatatgctgtctacgttgccaagctgaatgcctccggcaactggctctgggctgccggagcgggggggccagatcgtgacgatgcgtatgggtatggcatcgccgtggatggcgcgggtaactcttatgtaactgggaaatttaatggtacagttactttcggcagccagcccctgacctcaaacggatatgcagatatcttcgtcgccaagctgggccccaacggcaactggctctgggcggcccaggcgggaggaacgaacgatgaccatggatacggcatcgccgttgatggagcgggtaacgcccatgtaaccgggtattttaacggcacagccaccttcggcagccagaccctgacaacaattggaggaaacgatatcttcgtcgccaagcttgacccctccggcaactggctcaggattgtccaggcgggaggaacaggtggtgagacaggacgcagcatcgttatggatagcgagggcaacgcctgggtgacaggagattttactggcacaaccactttcggcagccataccctgacctcaagcggatttggatatggcacatatgaaaatatctttgtcgccaagctggacccttccggcaactggctgtgggcgataagtggaattacttccaatggaggcaaaggcatcgccctggatggtgcggataacgcctgcgtgactggatattttggaggcactgccaccttcggcaacgatagcctgacggcaagtggaaccagtgatatctttatcgccaggcttggcattcaccccggtgccggaatccccatagctccgggaaacctgagcatcattataagcggccagaatgtggagctggattggggtgatgttacattagatcaggcaggcaatccggtgagcgtggaccactatctggtctattattgcgccacccgtccagaagggccattcacggtctttggagaggatggttcgatctcacaatcgcagtggacacatagcggcgcagcatcgctatcgccaggcttttactatgtaacggcggttgtcgcggactgatgctgtaacggcgtttaccgcaaatagccctttccgcataaagttcagagagccctgccctggtggagatttgaagccaggcagggctctttgttatccatgctggctgagtttggagttcaagccggcaatacaggcttcaatactttcgccaagccctgagctggcttggacttcaaacggtcttcaaaagactggataacggctcacgcggataatttaagggctgccgaagtccgttcggcagaggcaacggagttgcctgtttggaagagacctccggtctctgtggcaaacggactttgccaccccaaggcactggatcatacctcgcaggccgtgatgacacggttttggggtctggttgtggtttgtttcggggctggctggttgtttctaaaagactggatcccgggtcaagcatgcgcttgcccgggatgacgcagtgtatagtctggtggtgtttgtttcggggtcgggtggccgattctttcagcggcgcttgacgatcgcgtccgaaaactttgccttgagcagggctgtcctgagcagggccttgaaacttgtactcaccgagcggaactttaatgtcccggagcgaaatcctctgtagagcatggggatcagccgccaattcttccccagatagatgctgaggtaggctttggactggaagcgttccatctcctgcggggtcatcccctgaggctggtaaacgcagtgggtcaggtcatacttttcccagtcataatgaagcagccttccttcctgccgcagcctgtcaaagacctccgtgccggggaagggcgtgagcagggagatcaccacgattcccaggggcagggaacggaaatagcggatgttctggcggatatagcggggatggtcaaattcatcgccgctgcccaggatcatataccatacatggctgatcctgagccggttgagcgtgtccaccgcctttttcacctgggtgctgtcgatctgcttgtgcatcttttccagcacttcgggaacgccgctttccaagccgatggtgatcagcgaacagccgcaggccgccatcctggcaaaaagctcgggatgcttgtagatcacgtccacgcggctcatgcagttccagcggatcttgaggcggcgctcttcaagctggcggcagaattcgttcacccatctgatatctgcggtgaggttgtcgtcgtgaaaccagaactccctgtacccccaggaaacgaattcctccagctcggaaatgacgttctccacaggacgctggcggtatctgccgccataaaaggaagagatggagcagaaggaacagcggaaggggcagccgcggctggaaaccagcttgggtgtgaagctgaactccggggccaccaaatccatggagatgcgcggcaggcggctgagatcgtccaatagcgcgatgtgcccgtcgttgtggtaatggccgtccttgaggaagacgataccggggatgtcaggatagcgttcgcccttctccaaagccgccagaagggcgggaaaaacctcctccccctcgccccggcaaacatagctgacgccggtctccgccaatacttcgcggtacatgaaggtggcgtggtgcccgccgatgatggtgggcaggccgggatggttttgcgccagatcgatgaggatttcgcgggcgacgggataggtggcggtcacgcaggaaacgcccactaggtcaggctgataacgcctgatatagcggggcagggtctcgcggtcggcaatcaccaccgtggccttgtgcccggcatccctcgccgcggcagccacgtagaccaggccttgtatgatttgatgccccttgcgcaggctttccaggccgctggtgcgcgcgcggggtgaaacgagcaggactcgcatcgttcgacctcccttttattgggtgtttaacccgaccgggagcgaccccgccgcaggggcaggatcactcgaagggcaggaagttaaggaatgcgttgatgtgggctgtggataagatcactccaattgtcacgcagataacgataatcagcttaaaatagtcctgggccttgagcatgctcaccaggctctgatcgcgggacaggtaggcggaagcggcgtagaactcttcaccgatgagggtatagtcgcaggtggtgataaagaagggaatctgggtgatggcatcggtggcggcgatctggattgctccggactggtttccggtttcggtcatgagcagggcttcggcgtagaagtatcccatatagaagatggtggcgaccctttcgcgcacggtgatgccgtttaccgccgcgcagaacgcgaactgggtgtcggaaacgaagaagatgtcgttctggttgtaggcgtcaggcctgcccatttcgctgtaggcggtttggaccatctcctgcgccaaaggaaccacaaagtagtccacatggggggagatgagccggatgtcgtattcggcggtctttttggcgatctggttgagaatcatcatggcagagatggtgcacacatcgccaagggtgccccaaccgggaacgaacatgaccggacgccccatctctgtggcgcggcccacggcgttgtcaagctccgccaatcccgcgatggggcggatatacaactccctgcggcgggatattgatacggtgtaaaccaccagcgcgagcatcacaaacgaagcgatcagggtggcccatttggtgctgtcgaaccagtttcccacgggatagttccaaagctctccaccttcgccggaggctggttcggcgatgttccagaagcccttgccatcggtcatcagcagttgataggcatagctgcggctgtttctgtccttttcagtccggaagaccttgcgccaggctttgtccgactttgcgtccctggcctgggcgtaggcgggatggttgcgcgcgaaatccagctcggcctgtttgtcccgcaattcctgggctgcttcggagaggctgtctccgggcgccagcccggctttgagggctgccagttctttctccaggtcggtcaaatagagggcaaaatcctgcttgtaaaggggagcccacaaaaccgctccgctgacggggtccattgccactttgaaattgggttcaagcagcagcctgccggtcttctggtcaaagcctacgatctggggcgtgacggtgtcttcaaaggggatggtgtggtcaaaggcgcgggaaatgccgccgatacgcatgacggggctgtaatccgaatccagtttgcttttggcaaagacatcgaagaaatacttgttgagaaactggccgttgagggtgaccccgctgccgttgaagcgcatggcctttgcgtcataagccacatcctgccagacaacctggggatcgaaatccttctctccccgcaggcggaactcgatgcgcaccatgaagctctggtttttggcgaggctggcgggcagcttgaactttatcacgttgtccagatagtattccgtgaccgtgcccagggtgtttttggcggcatcctggaaggtaaagcgcagcctgtctatctcgtaatgctcgtttttggagagatcgtagttcaccctcagcttgtttttccgggagctggtataggaagcctgcgtgatgaaggcaaagggtttgccgaaggaaacgatgaggttgtcgcccttgtcgttgaccttgtcaatcacctggaaagccggcacgatgggcagttccggggagtttctgacatgcgcgcttttgcccagggtggctgcctggaaaccgctatagtccataaagctgagcaccggaatgtagtcctgcaggctggcaggcagcttgatgccttccgcagccgcgtccacctggtggtaaaaggtctggctccaatagggaggggtgtgttcaaagagctttatggaaccgttttgccaggcggcgtaaaacacgctgtccggggcggaggcgttcttctgctgttcctgccggtaaagcgggagcaggtttttgggcatcagccagccctgccagaggccgatatcggtggttcccgtgggagggctccattcaaacttgaactgcctggtgtcctggatgtaggtggtggcaaacaccgcgctggaatccggccggttgtcaacggggataacgctgcagacccgggcggctggagtgcgcctgcctgtctcggtcaccgccaccacgctgtaatagtaggtgtttccgggcagggggttggcatagatgctttcaaactggttaagcttgtaaccggcaaagacttccttgccctcttcgccatccttttccacccggcgggagccgttgtagaaaccgcgggcggtgatgttgcccagcacgctgtaatggggaagcatggtgctcacgacgttcgcgtccctgggaactgcctggtagagggggctgtccgggctttggtgtttttcctttttcagtttggagggagcagtctcaaactggaacagggggaggtaatccctgtcgtagaaaaagaggtattcacccatcacaccctgtttgggatccacttcaatgttacccagcaggaagaggctgtccggcgaatggccgcgatagaggttgtattggatgatccggtggcttttatccagaggcttccatctcaggagcactccgctgccatcgtcgtggggcatgtcgagagcttcaaagacctccaccccggcatttgctgaacggccgcggacgcagccgcccatggccagcaggagtgacatcaaaactaagaggcagaacaaataatatcttttcattgctttatcccttggggcattgctggtttaggcaccgacgcctgaacacgacccggggggaagatatcgcgcttcccccctcatgatctgtgttaaattagttgaatatcgccttgatgacgtcgttgaccaggaactggatacgtccgatcagcagtgagatacgcgccataacggtgagtccgaatgacgcgccaaagccaaccatcatgtaccatttgccgatgtttacaaatttcccgtatccgccgctgtgagctttggaaaagaagaaatagagcaacacggcgatagttccgatgaagatcagcagcaggtttatgctttcgattggcaccatggcctggcgcatctgcaccagaatgctgttgtgcatggccaggggaacggatgcgcccacgcccatcatggaaaaggcgattggatagcgcgaaagccagctgaatttgcgggaaaagcggaacagatagaaaataccaatgatactgggtatgatcagtatccattggtgcttgaggaagatgggctggacgaagaaggggatgaaggcgcgctcgtaggtgagcaccacggagtagcccagggatatccccaccagcagttgttcggacatctgatagaacggattgtccttgtaaaggaaggagaagatgcagagggtgaagaaggctccaaccaggttgctgaatagttcaaaagacattttatcctcccttacttcttttgcgctttggcccggctgatgaagtagccgatgtttccgatgatgataaagagaattatcataatgtgggccaccgactgggcgttcatgccgatgcgggcagttttgaatttatagatggtgttgtgggtcatgcggttgaggtcgttccaggctgtgtagccaagcttcttctggtcgtcctctttcaccttggtgacgtcgatgaccacgttgttgtcctcctcggacttgtagctgctcatcaaagcctggacttccggaggatagttggccaggaacttgtcaaactcttgctgcgagaaaacagctttggtctgggtggttatcttgagcagtttctggatggagtcgtcctccagaacgtcgctgctgaaggagcggccggggactatcttgttgccttcctcgtcgtaggtgacgcccatggggtcgccgggagcgcggtatgcggcaaagacatccaccagcttctcatattcggcagcgcctttcaagcccgacagcatgccgatgaactgtccggtttgcaggtagggatattcgtccgccgccataacggccgtgacgccgacggcgatgttggtgccgaatttgggcctggcataggtgagccagtagccacccgccacggagccggagaattccaccaccaggttcatctcgctgtagttgttaatccctttcataatgggcaggttttccaccttgcgcccttcggcgtcggtgggcaccgccgtggctatgtcgtcacccatgccgatgatggttggcatgatcagggcggaagggatgtagccaaagttgcagtagtccaccccagacttgatgtccgggtattcttcttttacggagttcacggcatagtcgatgatgggagcgccggttggcatgaaggaaagcaggaagagcttcacgttgcgctcgaagcaatggcggatgatcgccacttccatcggatacagttccggcatggtggaagcatcgtgccagaagctgagcaggacggcacggtcttccctgccggcataggagtctatcaactgataggtgttctccgtggggggagaggtgatgttatctgagttataggggatcatcaggggaatgacgatcgccagggcgaccacgatgtagatccaccggcggtcgagcttttgcagtctttcaaatagattcattttcacctccgcctttaatctccgcccagatacgagcgttcaattcccaacaggatcttgagggtggtggcaacgctgcccagacccacacccagcaggattccgcgcttggacgccaggttcggcacgtccaggatccattgggagatatcaggcaggtatctgctgatcttgacgcccagcggcacctgggccagcatcacaactatcgccgccaccagcaacacggttgcttccgcggaacgggcgcggaaagccttgtaggcggcggaagccatatagaaagccagcagagcgaacatcgtggcgctcatcggcatctgcatattttcgaacagccacatatagaggccgcccttttgggttccgccgatgaatccggccaaagccgtgatgatgaaaccggcgaaaaagaagaaactgtattgccatttgggagctttgcggcgaatcttggctgtgtgcatcatgcaaaggctgatcacgcccaagagcatcccgaagggagacatggcacgaatccagggcacatagaaatcgtagtagaatacatcctgcagcagcctgtgcggcacaaagacccacagcacccagacgattcctcccaggatcactatcattaatggtattgtcttcttcatttacgacctcttctatttaatagggaacatttgcattaaacctgtgacctggaagctcgccaaaacggcacccagaatcacgaagaccagaatcaggaacttgaaatagtcctgggctttcagagtccccagcagcatcggctcgcggttgaggtaggccgaggcggcgtagagctcttctccgatcagggtgtagtcgcaggtggtgataaagaaaggtatctgcgtgatggcgtccgagccggcgatctgcacggctcccacggtatttccggtctctgtcatcagcagggcttccgcggcgaaatagcccaggaagaagttggtggccatgcgttcgcggatcatgatgccgttcacgccagccacataggcaaattgcaccgaggtgagatagaatatgttgtttttatcgtagctgtccggacgccccacggcatagtgagcctccctcactatctcctgggcgatgggcatgacgatgtagtcgtagcaggggacgatcagcttggtgtcgtattccgcggcttttctggccaccaggcccaggattcccagggaagccagggtggccacatcggaaaggccgccgttacccatacaatacagcatcgggcgtcccatctcagtggcgcggccgatggcattgtcgatctcctgcaagccagcgatgggacggatatagagatccttgccctgcttggcgaggcgcacgaagaccaccacccccacgccgaagatgatgcaggtgacgagggtgaccagtttgttccagtcgaaccagttggatacagccaggttatagatatagtcgcctttggcatctttttcgggataggcttcggtgaagaggccgcggccgttggtcttgacgatcatgtaggattgcaggcggctgagcggttcgcggatggaggccacgaagttcattctgccgcggttgccgcggaaagtgagggatttcttgtagtccgggtcattctcgcagatcttgatggtcttggccaggtcttcgtttttggcggtcaggctggcaatctgctgttgcaaagcctgcgcctggggattggcttcgccgccgggaagggctttcatttccgcttgcttggtggctatttcggcctcgttgtccttgatgtcctgccgcatcttatccagttcaccggcggcttcatccttgaatacgctggtgcggatggtgcgggattccttgggatcgtcctgcttggcatatttcaggtcgatctgcgattccaccaaagccaggttttgaaccttttcgccagccttcagcttgcgggtgtggcgttcgccgcccatataggtgtaaagcgtgccgcccttcacaaagttgaagcccagcacaggcttgcccacgttggcaacgtaggggatggtgacatccaggctgttatcgtaggaagtattctttttcaccagggtaaactgcgggccgctgaacgttttgcggaacaccgtattttgcacggcggaaacatccactccattcctgaggagttcgctggaaggcatcagcgccatcatctggttgtcccagacaaggttttgctccagcacatattcaggcaccagacggcctttctgataggtgatccgcccgtttttggggttgatcttgtaagggctggtgttcatcgtgatgcgcaccttgaggccatttttcagatcatatccgctcggcagggtaaccttgatgatgttgtcctggtaaaactcgttcaccctggcaaagggcttgtccgaaccgggaaccagcagttcaaagtagatgttgttgaccttttgcacgtcggtcttgttaagctggtaattgatctttagcctggtgccgccttttcctgccagaccgagcttcgcgaacaggcctttattgccgttctcgcgtctgagagcggaggtcttggtgatgaacactatcggttcgttccagacaaccgtgagcctgtcgcccttgtcgttgggtttgtcttccaccacaaactgggctgcctggggaagcttgccgctgtccgaaaggactacactggcctggcgggacaagggagagggattgttgctgtaatcataaaactggatcgcgtaacggccggtggaagcccgttcccaactcaaaccatccggcaatttctctttggtgaccgccacatagtttttgagcgcgcctccgccgattggaccctgggcaacaggcagcgcgttggccatggcctggggcgtgcccttgatcctgttccaaagcgaatcaggcatctctggcaccgccatgatctggtagaaggcgaggtcggatttgttgaccggatactcccactcaaagcgcagcgtcatgctgtcttgcaaagctgtgcaatggagattgggagaagcctctggcgcgtcgtccacggggaatccgcacttgggttcggctatgcccagatactggttgcgttcattcaccggaaccacggtatagtaatacaaaatcctgccttcttcgctggcaggatttgaggacttcagggaagcatagatggtctgctggttgaatttcacgccggaatagactgtcttatcttccgggtcggcggaaaaagctttctttgtccggcgataataatctttggattccatcatcgagtaaaggctgtagccttcgctcaacctggctgccagttccatatcgcggggaatgttgcgatacaggatgctgcccttcttctgcttttcgtgcttgagctttccaggcgagttgatgtccacaaaatcgctggagccactgtcgtagtaatacatgctgtccgaggcaacgccggttttcacgttcaccgccacggatgcaagatagaacagggaatcgggggtgagtcccctgtagatgcggtattcctggattctcttttcgcggggcaggggcttccagcctatgatcaggccatcgcctccatcgttgggaatatcccgcacaaagagaccctgaaccgtatccagggattgcccgttctgatccttgcctgttgagaccttgcatccggccagagccagagcgaggacaagcatcagtccgaaaacacgtatgtacaatttcatacgcttactcctatgctttttcaatttagtatcttccattaaattgcatcaccttaaaactgcgcaatattgtcaaatccttttttccttgcctgataccaatttgctttcaccaggctattttatgctatttgtaatctggcattctcttgtgatatccgtggaaaggtgttttttgaggtggaaaggtggaaaggtgaaatggtggaaaggttcccccataataagtctaccagacctcaaaacaaagcataccaagctataaaactgcgtcatcacggcctaccggggtccccgccgaagcgcgtagcggtttggtggggtggtttgagccgtgatccagtcttttaaatatatccacaaattacacaaattacacggattaaaagaacagaataaggacaaacgtccaaccaaaaaacaaccacccgaccccgaaacaaaccaccccccagactaaaaccgtgtcatcacggcctgcgagccgtgatccagtcttttgaaacaaccacccgaccccgaaacaaaccaccccccagactaaaaccgtgtcatcccgggctaccggggtccccgccgaagcgcgtagcggtttggtggggtggtttgagccgtgatccagtcttttagagactaccacgtcagccccgaaacaaaccacaccagaccacattagcgtgtcatcccgggctaccggggtccccgccgaagcgcgtagcggtttggtggggtggtttgagccgtgatccagtcttttagagactaccacgccagccccgaaacaaaccacaccagaccacattaccgtgtcatcacgggcttgacacgggatccagtgcccaggggtggcaaagtccgtttgccacagagaccggaggtctcttccaaacaggcaactccgttgcctctgccgaacagacttcggcagccctttacttgacaaccgcataaataaaccactacattccgcataatccttcatagcgccctcctttgctgctacttgattttgtgccatcatccttaggtcatccttataaattataaggttgacctaaggaagaccagggtctgagcgccggatgcaaatgagagccacccgcgcgcgagggaaaagggaagtggccgacacatggccgtgcaattacgggcaagtatattaatatacttgccttggagtccgcttcctgcctggcatgaaggggtcgtagcacctatatatgtggggggattatttggtggaaaggtggaaatgtgaaatggtggaacgaaatagaatgatggattaccggggtttggcagccctgtctcagttccgcggcttgggcggaacaagcccgccttcctgtttcatattctgttgatcgccgtaaagataccagactccatcctcccggtaaaaataggaggcgtcgcccccggtgtctggatccagatagctgagagtgctgtcggccgtcgtgaaggtcagcttcatgctcacggttgcccgggagccagccaggtcaacatcctgcacctccacatccagcaggtcgaagcgtgccatacggtcttcccacagttcgcgcagctgaaagccatacatccctttgtggtaatagtccggatgcacctgctccatgatgccctcaatgtctttccagctgaaatcgcgggcgatgcctttcaggatatcctcgatgcggattttgtccatatcttcgggactgctggcgagattgcaggacagcaggaacaaacagagcgacaggatgccaagctgcttcatgcgcggctcaaccaggccagggtctcgatgtgccaggtctggggaaacatgtcaaaggtctggatgccatccagtttgtaacgcccgctgccaagcaggatcttgagatccctgtgcagtgtcatgggcgcgcagctcagatagaatatccgctcgatacccgtgtcgattatggcttgcagggcggctggcttcactccggaacggggagggtccaaaatgaccacatccggtgttttgcaggggctgctttgctggtctgaaagcagcgcgggcagggcgtcctccactctggcgcagagataatccacattcgccaggtcgttcagttcggagttcagttccccatccagtgccgcttcccggcattcttccacgcagagcacgcgttcagcctgcgcggcgaggttcagtcccagcgccccgattccgctgtaggcgtcgaagaccagtcccactttgcccatcagtttctgcaggcgggcgatgatctgttccgctgtgccgcggttgatctgccaaaagctgcggtaatggatgcggaagcgtttgcccgccagttcgtcaaagagccagggattgccatagagcagtttgtcttccgggcccaggatcacgtttccccgctcccggttgatgttttgcacgatgccgctgatgcaggggaactccgcggtgatctgcttcacaaagaggttggaaaaaggcagcttggctcccctggtcaccaggatcagcagcaccgagctttgatccttgttgcagcggaggccgatgtggcgcaaagtgccggtgtggctggcttcagagtaggcctgcacccccgctttccggcagatttccaggcaacgctgggcgatggtgtcaaagagttggggatgcagaacgcaacgctgatgggggacgatcctgtgcgaccagcgcgcgtagatgccataatagaggccatcggcgccggaacccacgggcagaaaggctttgttgcggtagtttacggggtttggggaagcgggggtggcgccgatcttcaaatccggggccaggggctgcaacaattccctcaccagttcggtcttggcagccaactgcgccgggtagtccagcatcagccaatcgcagcctccgcaggggtcgtccaggtcaaaggaagcgcagtccgcttcctgcactcccttgccccgctccagccaacgcaggggcctggcaaaggctgtgtccttgcgttctttgaccagctccacttccgccaggtcgccgaccgccatccgctgggcaaagatcgccttgccctcgtgaaagcccaggccaaaaccgcccagagccagcttttctatccggaggatgaatctcttgttcacaccatcatcttgcgcagggcttcaatcctcttctccaccggcggatgcgtcgcgaacagggagagggggctgaagttgttgatcttggcaatggcataggcgtctttgcgccgcgaaggaacgaaagctttgctgatcttttccaaggcggtgatcatgtggccgggggtggtcagggcggcagaaccggcgtccgccttgtattcccggtggcgcgagtgggctgccagcacgatgttggcaaggatcatcagcacgttctggatgatcatcgcgatggcggcctggctggcggaatgcatcactccggccgaagcgccgtcatcatcgtttctgcctcttctgccgctcaggagggcggcgatgatattggccagaaagagcacaaaggtgttcatggtgcccatcagcagggtggtggtgaccatgtcgccttcagtgatatgcgtcatttcatgccccgccacggcagccagttcctcctcatccaggttttgcatgattccactggaaaaggcgatcagggatctgtttttggacgcgccggtggcaaaggcgttgttgtccgccgcctggtagatgccaaactccggcatcctgatacctttgtgggctgccattttctctatcgtatcaaagaggtatagctctttgccgcgggccgtttcccgggtgagcggggtgatcttgtaggatgccttcgccatcgctttgctggaaagcagtgaaatgaccgccccggcaaagccgaatatggcgcagtaaaccagcagaccgatccagtccgagcttctcacgcccacgatctgcataataaaacccaagacagccaacaccaggatgttgaccgtcaaaaacagcccccaacgcttaattatagtccccatggattatataatcctccttacaggtttatcggattcaggggcagccgcgggagtgatctcagccgcgccgcccttggggtcacactaattggcagtgcgataacaaggcaagtaaaatttttagtggatgaagacaacaaaggttactgcgtcatcacgggcaagccggggtcttcgacggatcggttacgatccggtggggtggtttgaaccgtgatgacacggtgtatagtctggggtgctttgtttcggagctggctggttgtttctaaaagactggatcacggctcgcaggccgtgatgacgcggattttgggtctggtgtgctttgttttggggctgggtgtttgtttctaaaagactggatcacggctcgcaggccgtgatgacgcggattttgggtctggtgtgctttgttttggggctgggtgtttgtttctaaaagactggatcacggctcgcaggccgtgatgacacagtatgtagtttggttggctttgtttcagggctgtgtgatgtgatgtggcctcaaaagactggatcccgggtcaagcatagcttgcccgtgatgacacggtatatagactggaggacttgtttcagggaaccttccacctttccacctttccaacttttcactatgatggaaataaaacgcaaacaatatagtatgacattcaccaataacaacggcaataatatgcatattccttcatagcgccgtcccttgctgctcctgcatttgctgccaccatccttaggttatccttataaagtataaggatgacctacggaaaatatagacttagcccaccctggcaaatgagggcaaaaaggtgatcaatcaacgcccattaaatgtataaaggttatcaatagcagaggtggggcgcaaatgatcgcgatggagatacacgattggtgcgtggtgcggattgcccaagcaagaaaaacccccgggcagtgccgggggttgcaatctcagacagggtctgatcagttgactttgaaggtagtgtcgcctttttcaaagaaggcgatgatctgtttggcagccgccactccggcgttgacgttggcttccccggtctgggcgcccatctttttgggtgtggcgtagtagcggtcggcatagagttccatcagtttgggtgcgcattccggttccacgtcgctcacgtagcggaacttcttcttttcctcaaatgctttgagcagggcttcctcgtcaatcacctctttgcgggcggtgttgaccaggatgcagtcgggtttcaccaggctgagcaggttccagttgatggatttcttggtctcggcggtggcggggatgtgcagggagatgtagtctccggtgctgaagatgtcttccaccttgtccaggtgtttgacgccttctttggccatgacgtccgcgctgatgtagggatcgtaggcatagacgtccatgccaacgcctttcgccattttggcgagaaagcggggcacattgccatagccatagagcaccagttttttgccagccagctcggagccgctcttgccgttgaacttgccgcgcgccatgtagatcatcatggccagcgccagctcggcgacggcattggagttttggccgggggtgttcattgccaccacaccgtgggcggtggcagcggcgaggtcgatgttgtcatagcccgctccggcgcgcaccactattttaagttgtttggcggcgtcgaggacggcggcatccactttgtcgctgcggatgatgagggcttcggcatccgccacggcggcatggaagtctttcacatcggtgtagttttccagccagctatggggatagccggccttgtccagttcagccttgatcttctgcacggcttccgcggcgaagggcttctctgtggcgatcagtacttttggcatattagcctccctatgtatattttatttctggttacaagactttattccggtgcgttttatgtcaatgcaaatctctgtcatttgagcagcagcatgcgccgcgactgcacctttccgcccgcctgcaggcggtagaggtagactccgctggagaccgggtcgccggaggcgtcgatgccatcccaggtgacggtgtgtgaaccgcgggaacgcgggccgtcgctcaggacgcgcaccaactggcctttgaggttgtaaaccgccagccgggcggagccttcggaagccagttggaagcggatgctggtgctgggattgaagggattgggaaagttttgcagcagggcggtgcgcaaggcgggagcgtcatccgcgggattggagacgtttccggtggaggcgtagctgccctgtctggtgagtgagccgcggtaaacggtccagggccggttgtccttttccgcgcggcgcaggttcagcaccagcactccggtggaatagccgctcaccagcttgagccagccgtcgccgtccagatcgcaaagcgtggcgggagtgcagccgttgaagctggtctggaagggaaatccgtccaatacgctgccatcgtggttgaagccgtaaaccgagttcacatagctggaaatcaggatttcaagctggggatcgtcatcgaggtcagcaatgatgggcggggtctgcaacaaggcgccggtccgcaccgggaagccgggaaggtctatcccgctctggctgaccgcgtagagtgagccgttggcggtgccgaacacgatatccagcgcgccatcgccgttgatgtccgccagggcggggcttcctcccatggaggagcagattggcttgctgaagaccaggctgccttcgggtgttgccagatgcaggtgggtagaggtgccgaaggcgatcctgcggttggcaaggacggtgggcgcgccgttgatggggccggagacctggaggggaaagcccgccaggggggtgccatcggatttgaccacgtgcaacttgccgtcaaagcagccggcgatgaactcattgccgccgtcgccgtcgatatccgccacagccagttcgctgtggaaggcggagccgaggtcaagcgggaagcccggcaacaggttcccggaggaatccagaacgtggatcctgccatccagggagtgcgccaccacttccgccccgccctgcccgtcgatctgggcgatcacgggggtgaagaggaactggctgccgccgtcataatcgaaaagcacttcatcgcctgccagagccagcactttgccggtgcggctggtgagcaccagagccggttcctgcccgtcaatcaactggccgtaggcggcgctgcgcatcacatcctgctggaggggcgcgggaatggagctggtctgctgcccatcgttatccagcagatggctgttgccgaaaacatcggtgtaaagtatgtcgaggctgccgtcaccgtcaaaatcgaagacgatcggggcggatttgctgcccacggggcaatcccaggggaagtcgccgtctatgagggtgatatcatagccgaggctgaatctgcgggttccggtgctcaggttggtgacgggatgcagcgattgcagctccagggtgatctgatagctgccgtaaccgctgccggacggaagcagcacacggaaatagaggccgggatcgctggtctggcccggcaacaactggggtatcaccagcgggccgctcaaaagctgcgctccggcgggcaggccgctgagggtggcggtcacgttgtgggcagcggcccaatcctgatggttgccgatcacgggatggatgcggatgatctcgccgggattgagggtgccgtcgccatcgccctccacatcgtcgattgtgtagttttccaggctgagcaggggcagggcgggatcaggaagtttgacctcgatggaaggatcgccgaagagaaccatctcaaagtagcaccagcgcatcacgtcatagttgatggcggcattgaggttctgctcgcgggaatagctgagcgcggagccgaattgggtgttgggagtctggaagaggccagtgaagtattctcggtcatagaactgggaggcgccattggtgtcgcccggggaataccagccatagcgggtgttgccgaggaaggcaaatactccgcccgcggtggtgattatatgttccgcgatgctttcgccatcgccgctggtggcctggtcgaaggcggcgggatagcagccctgggtgtaaagaaagccatattcggtgttctggagctgctcgatgctggtgttgctctgtcccatcaggaagacttcgttggcgtggcccatgtggttcatcacgtgggcgccgttgttgatggcgtgccagacgccctgctcgctgtaggtgccgtcacgctgatacatggtgcgcaggtggtacagttccgggatgctggtggccacttcgtccttgtaatctccgccccaggtgagggggtagttgttcaggttttctccgaacatgatggcggtgttgttgctgaatgtggaattgccggtgtagtattggattttgcggatgatgttttcaaactcgggctgggtctcggcgggaaagcgtccgatatgcacttccggcagcatgtccacctggtcttgcggttcgccccagatgtcgtttccattggcgttccagtctccatccagattgctgaaatagaggtcggtgggcattctgagatcaacagtgtcgcccacctggccgtagcagccacgcaggggcacgatctcgtcatcgccgcccaggatcacgtattgcagaggctgggggctgcttgcccaggcttgataggcgtcgctgatgaaggcgcgcaccctggcggcgttgtcggttccgggatagctggcatagatatccgcggtctggaatacgccggtgcttatgtcgttgccgtcacgccagttggcatagccttgcagccaggaggaggcggtggagttggtgatgatgaccatttggcgcggagtggaaaggtcgatcaggcggctttggggagcgtggtttcgatagcgggaagcctgctggtaactggacagggcctgggaattgagggcaaatccttccacagagcgggcagccagggcgggggtgtagaaattggcctgttgggtggccagggcgtcatcccatccggtttcgatctcgatgctgaattcggtagccgcgtgaatctggcgggaaaccggattgtatttccaggggaagaggtccagcacggcatattggaggccacgctgcaactgggtgcccagatagcggtgattgacggccgggaacggcgcgtcgctctgccagatcgctggatcgggttgagtggcgtcaggacggggctgcgaagtgggctgctgctggcgcgcgtagtccagatacacgccatcgcgctgcaacaggtaaggggagctttgcacactcacgttgagcaccttttccccaaaggggatcagcacccgcacggggtaatagttgagcgcgggaacgccgggctccagcaggggtgccgtgggctggccgcgcaggctgccatcccaggcggaggggtcaacgcttacatcgagggtgagcgccaggctgattccgcagagcagcgtcaggccgatcagggcggtaagttttttcataatctgtattccatcttggtttatcgaaatgtagtcgaaaaattcttgtgtgagaaatggcagattcagtcaagtagttttttgagggcaaagaaaacaggcgtctgggctgcgtttgtgatttgtgaatacctgtgtaagacaaggaatacgaaccaatccttggattattgctgtcctggcaatatcagcccgcaatgggcgcctcacgctgtatatcgggagcctgatacaatttaataaaaagagtttgcgaatgtggcggacttgtttatactatcattctgtaatctgtttgttttgcgtctttatgtaagggcagcgcctgcccgcgggacttgttatcttttccaatctatttgaaaaggagcctttttcatgaaacacacggctatgctactactactgctgctagccaccagcctggcttttgccaaccctgtctggactgaggacgtcgtggtgcgggaagcgcaggatctgagctacactggctgcacgcagcaagcagatgacggcagcctgattacgctctggacgcagatactggatggagaaaactgcctgatggcaaaccggatcagcgcgctgggcgaggagatgtgggattccccactgcgtatcgcgggctacggcctgggcatcggcggagagcagatggtgacctgctccgatgacaattatctggtctgctggctggaagtacagggatccagccacgcgaggctgatggcaaacaagatcgacctgcagggaaacctgctctggactgatggcggagtcctggtcaacaacgattgctacttctggcatggcgctaccgtcacccattacctgacccgcgccaacaactccggtggagcctacatattggtacagccggaccccaacctccccgccgcctacgcctacaaattgaatggaagcggcaacgacacctggagcctgatccaacctttgatccaggctgaacagcaattgacgcttaatgactgccttgtacccttaggagattcagatggtttgctggtgagttattacgccaccagccaggctgaaaccaactacaaccttacaactttcaactatttgaacggctccatccgttaccacagaagcttccctctggagccgggagaagtgggtccgcacgaattgttcttagagagctattcttatttcttcgatgcggttatgattgcccaaacggatacccggctgcgtttcaggttgtttggattggacctggaaccttatattgagcagcccgaggatctggtactcaatccccagcccatgccgctttcaacacactttaagctggataaggccgcttcgctttattaccgcgtactgagcagcacacccatcgatggcgtaacgcaggtacatttacatacttatatctggcttcatcacttgtattcccatttccaaatctggtctggaacaagcgaggtgagctatctggactggtgttatgacgacaccatgaaaaagataatcgtctggagcgacaattccggtccttacgcgccgctgatcctgcgcggccagatgattgacaattccatcggccaaccggcatggcctgcggatggactggtgatcagtgaaaactgggattccggctgcaagccccgggtcttcggctggaacaccaatcccatgtatctgctggtggaaaagggatccggaggcaagagcctgcgctttttgatgcgggatttaggaggcaatccgctgctgccggctgccgatccgctgtccgaagcgcttgctggttcagccattcccattgccagcctggcagtgaacgggcacaatgtgctgatctataacgactcccgccatcaaggcggaaactggatgtactttcagatactcagcgccaacggagagctgctgctgcccgccgggggcgttcccatcggcagctatgggccaaacattcgtttgctgggcgctatcaactatggcagtgaccgctttgccgtgctttactccgataccaacacctacctgcaggtctttgacctggcgggtaatccccaatgggctggcaacggactgctggtctcccccggagccgcctactccggctatgccaagctctgcgagcatgagggtgacatctatctgggctggctgatcgattatggaacaggaacgtcacaactttatggccagcggatcagcaacctccaaaagatgtggggagaatcaggcaggctactgctcgaagggctcccgaaccccaatgtcaggatggtcaacaccccgggacgctactttgcctggttccaacgcaggtctggcagcaacaacttttgcacctactgcctgctggtggacgccaatggcgacctgttgcccggttggaaccctcagggcaccaaaatcttcgaagcggctgccactccccaggtttggccgatcttctcaagcttggtggaagaagacctggtctgcctgatcgcgggctatcccagcgctcccttcttcgcccaacgggtctcaccccaggcggccttcccctggaccgaagcgggtgtcctgatccacgaaccgcaccacctcaccgtcggctgcgccatcgatgacaacgccctgaacctgatctacgaccacactgaaggatcgggagtgcgcagcatacgcctgcaaaaggtgtttttaaacggagggaatctggcctttcaataccctggcatacagatcaatacatccaccccgcatgggcttggcaacgtgagcctggcaagactggaaagcggcatcctgctgggtgtgtggagcgaacaaagcaactatcagaacgaagaccgcgacctgtattaccgcttcatcaatcccgatggcgaaccggtgggcgcctcccaatcgagcttcggctcccatcagggtgacgcggactatcccaggatcagcgccttcggcaacgaggctattgtctgctggagcgacgagcggacgggaattcccgctgtcgggcatcttcagacgggcgtctatgcccaaaagctgtcttacctgcccagttccctgccccaggaaccggacaccccctctgccgggctggccttgggcagatgccaccccaaccccttccgcgccagcgtgcaggtgaactggtcaaccaaagacgcccagccggcggaattgctgatctgcaacatccgcgggcaggtggtgaaacgcttccgctatccgctgttgcagccgggagaacataccctcaactgggacgggaatgacgaacaaggcagccaggttggctccggagtgtatctgctgcgcctcagtagcggcaaagagagccgcaccgccaagatcctgcgctggtagccattccataaaaaccttattacaagagggaagcgtttgctttcctcttttgaatatcctgccgcttttcggctctgcacaaagctaataccaattcgctttcatcaagctatattatggcaattattatacgtggaaaggtgttttgaggtggaaaggggttttttaggtgtaaaggtggaatggtggaaaggttcccccgaaacaagaaccatcaggctatatactgtgtcatcacgggcaagcgcatgcttgacccgggatccagtcttttagaaacaaccacccgaccctgaaacgaagcacccaagaccaaaaaacgtgtcatcacggcctgcgagccgggatccagtcttttggaaacaaccagccagccccgaaacaaacacccccagactaaaacccgtgtcatcccggcctaccggggtccccgccaaagcgcgtagcggtttggtggggtggtttgagccgggatccagtcttttaaggaatgtttgaagtccaagccggctttgggattgggggaatctatacagctttccttgccggcttgaactccaaaccaacacccggcctcgaaacaaaccaacccagactacattaccgtgtcatcccgggcaagcgcatgcttgacccgggatccagtcccaggggggtggcaaagtccgtttgccacagagaccggaggtctctcccaaacaggcaactccgttgcctctgccgaacagacttcggcagcccttatattatccgcgtatatctgcgtgaaccgcttgacccgtgatcctgtctttgaaaaacgccttccaaaaaataaagattcaacctggcgatatttttcttgacaaatctacttaaacccatccagtataatttcaactgaaaaatccatcatagggaggaaaaatgaaagcattgcaaagttcatttttgtgtcttttcctgctctgcggagcgatggttttgggagcgcaggcgccccagtggcaatgggcggtcaaggcggggggaactgactatgaagaaagcatgtccatagctaccgacagccagggcaaccagtacatcactggtatgtttgatgaaatcgctacattcggcagccataccctgatgacaagcggtggctgtgatatctttgttgccaagctagatgcctccggtaattggctctgggcggtcagggcaggaggaacagagaatgactggggattgttcatcaccgtggatggagccgacaacgcttatgtgaccgggtatttccagaacacagctaccttcggcagccataccctgacgacaaatggagagcatgatatctttgccgccaagctggatgcctccggcaactggctatgggcggtcaaagcagggggtgttgactgggatataggaggtggcatcgacgtggatgaagcgggtaacgcttatgtgacaggatacttttgctacaccgccactttcggcagccataccctgacaacaagcggaggcgctgatatttttgccgccaagcttgacccctccggcaactggctctgggcggtaaaggcaggagggtcaggcaatgactttggaattagaattgccttggatggaacgggtaacgcttatgtgaccggattatttcaaggcacagtctctttcggcagccataccctgacggcaaacggagaatcggatatattcattgccaagcttgacccgtcaggtaactggctatcggctgtaatggggggagggaataacgatatagatgtatttggcttcgttgtggatggctcgggtaacgcctgggtgaacggttctttttatgacaccgccactttcggcagccataccttgacggcaaacggagagaaggacatcgttgttgccaggcttgacccctcaggcaactggctttgggcggtcaaggctggaggaatagaatatgataatggctatggcatcgctctggatagcgcgggtaacgcttatgtgtgcggttctttttgcgaaaccgccacttttggcagccatcccttgtctgcagtcggatggatagatatctttgttgccaagcttgacttctccggtaactggctctgggcggtcaatgtgggaggaaatgaatatataaataacgctggatctggtatcgctgtggatggcgcgggtaacacctgtgtgaccggatatttttacgaaaccgctactttcggcatccataccctgactgcaagtggagaatctgatatctttgtcgccaagctgggaagcggaacccccgtggaagatgaacttgctccgcaagcgcttgccaggctgcataacgcctatccaaatcccctaaacagagatggaagcgcgctgatcaaagctgacatcccggaacgctctaccggcactctgagcatcttcaacctgcgcggacaggtcgtaggccgccataatctgaaccccggttcgcagcaggtgtcattcagcggggaagggcttcccgcgggtgtctatctctacagtttgcaatgcggggactaccgggaaaccaggaagctggtgctgatgaagtgaggtggaaaggggttttttaggtggaatggtggaaaggttcccccgaaacgaacaccagtaggctaaaaaaccgcgtcatcacggtcttgacccgtgatccagtcttttagaaaccatccacccgactacgaaacaaaccaccccagactaaaaagcgcgtcatcacgggcaagctacgcttgacccgtgatccagtcttttagaaacaaccaccagaccctgaaacgaagcacccaagaccaaaaaacgtgtcatcacggcctgcgagccgtgatccagtcttttagaaaccatccacccgactacgaaacaaaccataccagaccataaaaccgcgtcatcacgggcaagctacgcttgacccgtgatccagtcttttagaaacaaccacccgactacgaaacaaaccaccccagactaaaaagcgcgtcatcacgggcaagctcgcttgacccgtgatccagtcttttagaaaccatccacccgactacgaaacaaaccaccccagactaaaaagcgcgtcatcacggcctgcgagccgtgatccagtcttttaaggaatgtttgaagtccaagccggctttgggattgggggaatctatacagctttccttgccggcttgaactccaaacgaccagccagcatggagttcaaagagcctttccagacagcataattaccaccaactttctaggctcttctggacttcatgcggaggcaaaaacgaacaggcatattccaggatacacttttctttatcccgtatcgctatcattcgcaccatcaactgattagctaatcatccttaggtcatccttataaattataaggttgacctaaggaagaccagggtctgagcgccggatgcaaatgagagccgcccgcgcgagggaaacgggaagtggccggcacatgtccgcgcaattacgggcaagtatatttatatacttgcccttgaatcctcttcctgcctgggataaaggggtcgtagcacctatatatgtggggggagaatttttgaattggtggaaaggtgtttttgaggtggaaaggtggaatttgtgtgatttaagggctgccgaagtctgttcggcagaggcaacggagttgcctgtttgggagagacctccggtctctgtggcaaacggactttgccacccctggacactggatcatggctcgcatgccgggatgacacgcttattggtctggtctgatttgtttcgggttttggtcgtagtttctaaaagactggatcccggctctcaggccgggatgacacgcttgttgctctgttctggtttgttttggggtttggtgaatgtttccaaaagactggatcacggctcgcaggccgtgatgacacgcttgttgctctgttctggtttgttttggggtttggtggatatttccaaaagactggatcacggctcgcaggccgtgatgacacggttttatagcttggcatgctttgtttcgtagtcgggtggatggtttctaaaagactgggtcccgggtcaagcatgcgcttgcccgtgatgacacagtatatagcctggtggacttgtttcgggggaacctttccaccattccaccttttcacctttccactctcaaagatcctgtcgatcctgttatccgcgttctatctcttttccggcagcaccacgtcaccacttcaacacgtcaccacgtgattatgtcacctttccacggcgatgccaacatcgccatcggtaaaggcttggagggcagagcgaggttttttgttgacaaaaaagggctgcaatttgctattgcatcctgtcctgggtgattagctcagcttggttagagcgctacgttgacatcgtagaggtcactggttcgagtccagtatcacccaccaccctgattgttgggtgattagctcagctggttagagcgctacgttcacatcgtagaggtcactggttcgaatccagtatcacccaccacccttccccgcaaagcaacctggtcagagaaaaatcttgacagaaagcttgcggagatatccactgttcatgttaatcacgagcaaacgagagaataggcaaaatccaacattatatgcggaacacaggcatttacgcggtatgctgctgttgtgaataatatattttttcttacaccgagatttggagcatagctaatgatcaaagaaatgggacgtctgaacctggacgactacaaaataatggacgcccaggtggaaaagattttcaaaagcctggacaaaggcaaacgggaccaagccatcaagctgatagaggaaatgggcaacacggcgaactatttcgtgcgcgaagaaatgggcaagaggctggccacctatcagggcaaggggcccttggacgagatttgcgccgaaatgctggatgatttcatctacggtatccgcgccacggcgctgttctatttctattacaagaggcaggacgacccgcgggtgatcgtgaagaccctggaaaagacagtggagacggttccctgggaaagcgagaccatctgtttcgagctgtggaagaactatcccgaggccatgaaggaagagatgccccattgggcgatgtctcccagcgaaaacaagcgttccatgtccatgcacggcatggaaaacattgcggataaaaacccgcaatacatcctcaccttcatcggcaggctgctggacgacgaaagcgaagaggtgcagaaaaagatcggccacatcctcacccaggtgggacggcaacgcccgctgcagacttatgccaatatccggcgctggctggtgggggccagtgaagaacgggtggacgccatctggcagaccctgcgcaaattgggcagcatattcagccaaaagaaccagcgcgacaagggattcgacttcatgaacgtcaccaggcgggtgatccaggaatggaaaaacgatcccgaccccaacgtggcgcagatgagcaaccgcctgggacaactgctgcgtaaacaatgatccacgtaatcctggtggaacccatctatgagggcaatgtgggcgcagtcgcccgcatcatgaacaactttggtttcaccagcctgcgcatcgtgggcagcgtgcccaaaaagaacgacttttacctggccatgcactccgaacatatcctggaggaggcgcaggtctttgacagcctcaaagatgccagcgccgacctggacaggctgatcgccttttcccgccgcgtgggacgctataaaccggtggatatgaacccgccccagatggcggattactgcgccaaaatccccaaactggagatcggtctggtgtttggccgtgaaacatttggcctcaccgatgaagaggccgacctctgccccctgcgttgccacatccccgccaatccagccttcccctccatcaacctcgcccaggcggtcaccatcgccctgtggcagatccacagcctccccctgcagggagcaaaaccgcggcagttaagggcggtggatggaaatgaacttgacagaatccgcaactatatgcttgatgtaatgcgcgactgcggtttcttccgcagccacgagaccacgaactgggagcttttcctggacaagatgctggcgcagctcaaccccggcaagatgatggtctggcgcctgcggcagatgtttaaccgctggcatgtgctggtaaccggcaagggaaagggctacggccaggatcaatagattgcgcggggcgattcagatgccccgcaagttatgcctacaaggaaacaagagatgatagcactcaccgccgtcacggaaatgaatgaacgccagttggaaatcttttgccactgcgaaaagtttttcttcgaccacgaaaaacccgcgctggtcaacaaatatgcccattatttcaccgaaggctatgacgcctttggcattagcgaagaagagttgaaacagctgcgcgacgaagtcctgtcaaaatgggagcccagcgtgcaggaacttgcggaactgggcaggcacttctttgccacgggaaaatatgagtttggctcgctcgccatcatgctgctcaagaaacaccgcccccgcttcgaccgcgaggtctatgagagcgtcaaacgcttcaccgaggagtcccttgccaactgggcccacgcagacctgatctcgaccaagatcacccccgtgtttttggagctggagatagccaacatggaggatttcgcggagtggcggagttcgaccagcaaatggagccgccgggtgtccgcggtgaccatgctctggcagcggggaaaactgcctccggcagagctgctggactatatgcgccccctgatgtccgattcggaacgcgtggtgcatcagggcgtgggctggtttctgagggaactttggaggctgtttcccaccgaggtggaggagttcctctttgaacacaaggacagcgcgccgcgcctgatcatccagtatgccacggaaaagatgagcaaggacaagaagaaacgcttccgcaagaccacggcgcgcgaacactcacaagaccgccagggcaaaaagacctttggggacaaacgaaacctgaaaaaccgcggcaaataccaaaacaaacaggagttcaaatcccggcgccgttccgcggacgatgccggcatgcccttcaggatcaggcacacggaggaatccgatgaataagctttgcaccatcttgttactggccctgcccctgctgctgtggggcggaaacctttccctgagcgtcgatctcggcctgcccgcctcctccagggatatggaactgcagggttggggcagcctcagcgccccgggatatccgcaacttccatacaagactataaacgtgatactgccacccgcggcaaaggaactgagcttcagctacaactggagcggagcgcagaccccagacctgcccgccccggaacgcaacggggcctttttgggtggagaccgcctgctggacagccccgcccgtgacgcccaggcaggacagctgcactatctgggcaagggacgctggggcgacgtgagctacgcccgcttccgcgtgctgcccgcggtctggaatggaagctcctgggagggttacagcaggttggaactcgatctgaactggagcgaatccgcctccgcgcccaaccgcatcccgcctgtcctggcagaactgggcaaatccaacgcgaacctgaaggcaaacttctttgccaatccccgtgatctggacaaatggtaccagcccccggcaggtaaaaactacgactacctgatcgtcaccactcccgcgctctatgacgtgctgtccccgttggtcagctttcgccagagccagggcctggtcacctccttcgcggatatttccgtgatcctcgcctccaccccgggcgccaacggggcggacaagctgcgcaactacctttgcaatcaatataacagccatcccttcacctatctgctgctggtgggtgatcacgacaccgtgccggtgatgtatctgacgccggagccggatggtggcgatacagtggcttccgacttctattatggtgacctcagcagtatcgtggacacggacggagacaaccgcctgggcgagtattccccggttgaaggcgtggatgactacctttgcgactataccccggaactgtttgtgggacgcatctcatccaataatcccgtccacgtgtatgacgttgccaaccgcaccgtgttctacgagcagagtgacgccccctggaagcgcagcgccctgctgcccgctgcctaccttaactacggcggcgaaccggaaactatctatctgcagacggatggcgcggactttatggaatacgccaaagccaccgccctggcagattttcagaataccaccctgtacgagcaaaccggctggctgccctcccatccctgcgatcatcccctggactactatgtactgcgaaacctgctcgacacccaaagctacgggttggtgaactggagcgcgcacggctcttccggctcctcttcccgcaaggtgtggatgaacgacgacaactccaacggcttgccggacagttgggaaatggagtggatgggtatggttgacaggcagagctttgacaacctgaacaacagcgacggcacggtcatcttcatggcatcctgctacaacggcatgatcgacagcaaccagcagtgcatagcggaatacgcgttgcaaaagaaggctgtggcagcggtggccgccacccgcaccggctggtacaagatcggctggcgcaatcccggctggggagggctaagctcctataacctgcactacctggaaaacttcgcccgcaacgggctgtcctcgggagcctcgctggcatgggccaacctcctccacacccaatattacctctttggcgacccggtggacggcgggggaatcatctaccctgaattgcaaaacgtttacgcctacctccactacggcgatcccgccatcggccacagcggcagccagatccagcccctgggcgaaatcctggtctatgaaccctcccgtcatggcggcctgagagtggtggatgcgctgaaccagatcggcgggctgaacgtggtctatacagacaagctgatcccggattatgactatatcaaccgctttgaagccgtgttttgcctcttcggctggggcaatgccgcccatatcccgcatcccgattccctggattactcgttgctgcttggctatctgaacggtggcggcaagctctatctggaaggggatgtggcctggaatagccaggatcctttctggagcaagttcggcgccaacgccccgctgaatatgttcaccaatattgaagccgtaaagggctatcatgacggcgaactctggatctgggactacaactcccagtccaaccccaccgcgcaggccttgctgcccgcccttcccgccgccgagaccatcttcagcacccacagcatcgcctccgcggatgccagcatcggaatcctgcacgcggtgccggagcatagcaccatcgcctcctcctttgctttggcagccctgcaaaacggcgagtgggaactgaaagacatgctgggcctcatcctggatcgctttggagtattggaatatggcaacacccaagtggacgagccacagataccgatggcgcaaacctccctccgcggctatcccaatcccttccgcagccagaccagtctgcgcctggaactgcccgccaaagccagggtggacttgaacatctacaacctgcggggacagaaggtgcgctccctggccacgctcgacctgaacgccggcaggcacgaactcaactgggacggacgcgacaactccggaaactgtctcgctcccggaatctatttctggcgtttgaaagcgggtgacaccctgcgtcaggggaaactgctcaaactggccgactgacctgccccgcgactccccaatactatatggataggtgcgatatgtcttgttgcaaacgaatctctctgctcttcgccttgatctttgccgtcctgagcctcagcgccgccggacttcccgccgccttcaccaaagccggcaatccatccctgtacaaggaactgcatagccttgccaaagagaacctgaaacgcctgcgaaacgggcagggcaaagcctaccgccgcctgctgaaccggtacccggatgtggtgatggcatatctgctggcctatgaatcggacgcaaacctgcaatgcgccgctcccgcggatgtggaaagcaactaccggcagatagtcaaactgcttgccgggcaaggctgcgaacatagcccggaattctttctttcctatgtggcggatcagacggtttccgatgaacgcatcgaggcttaccgcgccgcgctgctggatgacggcctgcgccagatcatgcgcgactccgccgatgagctcgagctctaccgcaaggtctcccaatggtgcgtgagcaaactcaagtttcaacagacctccgggcgtgaccaatcgcccctggacatcacccgcaggagcatcctgggacgctgcgaggaaatgcaaatcctcttcgtggcagccgcccgcaccgttggcctgccttcccgccctgccagcaccccctggtgggcacatacggacaacaaccacgcctgggcggaggtgtggctggacaacgcctggcactacaccggagacatggatgccgcctactatcccgatcagacctggttcagcggcatgattgacaagacggtgctgatcctcgccgacggctcccttccttcagagcaggacgaagtcctgagccgcggccgctatgactgcgttatcaactcggtgcgcaactatgccggggaacgcgcccgcaccatcaggatcagaaccctggacgcgcagggcaatcccctgggcaaggtgccggtgcgcgtgatggtttacaactggtattccctgcgcatgctggcggagtttatcaccgcggaggacggctctttcacgctcagcaccggtcgcggggccttctatctctgcgccagcctggatggccgtcaggcgctggttcccgtcccttccaccgaacaaaacgagcttgatgtcgatctggttttgaacgaaggccccctgccccgccaggatatctttttggagtatccctccaaccccttcacctggaaacaggctcctccggagtgggatctgggcgtgaaggaagccaaagctttgtgggacgggcaggatcgctccttctccgagcggggagccgcctgcgcggacaccctgcagggcaaggtgctgagcgcctgccgcggcaaccatgccgcctgggaaggctttctgaagacgcatccccagcccggcccggactttttgaaccatctgctggagggcgatcccaagttcctctggcaggcagacgcggcgcagttcgcggcgctctatcagaacttccagcgcttcgatgccgggcagcttaatccggaagaacagtcttcgctgctctcgccctcagttttttatgaagagctgccccgtccctttggcaagccatccagccccagcctctatcccgcttcctttgttaaagcggggaaaaacgatctggagcggctgcacaacgccatgcgctggctgaagaaaaagcaccggatcgatcccgccaaagccctgcgcggcctcctgcccctggaagaggcgcaccgcggcaaatacctgagcaactaccaatactgcatcctggctgtcagcctggcgcgcgccaacggcatccccgccgaattcacccgcatccccgacctgatctatgtgctggtgaacgaccagtggcgctattacaacctccggctctgcgaatttgaggacggcgggaagaaggattccgcctccagcttcaccctgcgggtgcgcactctggatgaacagggcgcccctctggacatcgacccccaaaaccttgccctggcgcgctggcagaacgggctgctctacccgctcaaccacaaattcaccgccactggaggcggaaccgccacggcaaacctgccccggggagagtactatcttcaggcgggctaccgcgtctccgacgccaggacagcttaccagttgcagcatctcacagtggagggcgagcttagccttgacctggtgctgcgcgagtttccccgcaaatgggaagaactgccggaagactccgaattgcgccccctacttgctgaagcgggagattgcgactgcctgctgatcggcaactttgaccgcgaaaacagcctgcgcctggcggagaagctgaacgcggagggagtggaattcctctggctgggctatgaggaagctgccgccgcacccgccaattaccgggtcagccccgcctggcaggccctggtggtggcagatcagatcaattcagtgcgcagcctgaccctgctgcgcaaggacggcgtttggcaataccatcagggcatctgggaaaagctgccccgctaaacggtctttacagcttgccgcggctgaagcggtaaaactggttgcgcagcgccttcacgtgcattcccgtgatagatttgcgcatcttgtccggaggatggatcaccgagattccgtccgggttgatgccgccgatctccaccaggaatgcgcccgtgtagtggatgtggaaaaagtagttgcgcgcgttgccttcctttgaactgggccccgtggcaacctcatagtgcccgccgccaaaggccttgcgcgtccttttggcataggcctgggcaaagcgcagcagcgagtcgtaacgctctttctggctggggacggagctgtcgatggcgggcaaaaatatcttttcggaataggctccggtggcggaactgtggaagaagattgccagctcataattgttttcctgggccaataatacgctcgccttcacctctgcttcggacatcggcgcgctgcctttgaaattctcgtgcgagcccggcaccaccgcgccctgctcccaaaacaccggatagttgcggttgaggtcaaccccgtccgtccgccagtccagacctgtcctgccgtctgtttcctgattgttcttgcgtttgaactgatattgcccgctggtcaccacccggtagccttccggattgagggtggggatgatggtgaactcgaactccgccaggattttcttgatcttgcccgagtgcttgtaattcaccgccagttctcttgcccatgccagggcggtttccacacccaaaacctcgcttccgtggtgctgcccgatgatcaggactttgcgccgggcgtccggcgtgccgatgcagagggcgtggatgggcagcttttccgtgccgctgaagccgatcacccgcagggtcaccagatcggggtgcttgctggaaagcgcctgcatctctttttgcaaactttcccaagtctgatatccattgggaagggggtaaacgttaccaaccgctgcggcaaaggcgttcgtgcccaacgccagcagggacagaatgagtaggatactgtaattcttcatcatgagaccaagctgcggtagccccgcttttcgtcaacaaaatccgatctggtaaaaattagtggaaaggtggaaaggtggaatggtggaaaggttcccctgaaacaagtcctccagtctatatactgtgtcatcacgggcgtgaacagggatccagttcccaggggtggcaaagtccgcttgccacagagaccggaggtctcttcctaacaggcaactacgttgcctctgccgaacggacttcggcagccctaaaattatccgcgtgacccgggatccagtctttttgaaaaaggaaggccatgcgtgataaggcaggcgaaaccgcctcatagcttgatgtcccatcgtcaacctattgatgtccgggcgatagacagcccggcaatcggtcagcgttcaattagtcatcaacgggcgatgagaatctgtggggcgtgcgtgagccgcaactttgccatccttcgctgcgacagtctcttagaccatcatccttaggtcatccttataaattataaggttgaccccaggatgacccacgccggagagtgggatgcaaatgaggcacatccccccataatatataggtgctatgcccaaaagggcatggaaaaatgaaagagaacgcgggtcgccaaacccaaatttccaattgacaaatatgtgctgtccagataattgttcaataaggtaaggaatgaattatatgtgtctacaaagcaagaagataagtgataaacataataccctgaacagtataaaagcatttgcacatccgcagatgctttttttttaccccggaggatagcatggatctggacaaaatcataaaacttgccctggccgaggatatcggcagcggcgacatcagcacccaatacctggaactggagcccctcaacacccacgcctacatgatcgccaaagcggaaggcgtgctggctggggtggaagtggcgaaagccgtgtttctgcaggtggaccgcggcctcaaggtcaccctctaccgcaaggacggagaccgcgtggttcccggcaacgagatcatgcgcctggaaggaaaagccgccagcatcctgcagggcgaacgcaccgcgctcaactttttgcaacgcctgagcggcatcgccaccctcaccgactcttatgtccaacacctcaaaggcaccaaggccaaactgctggacacccgcaagaccacacccctgctgcgcgggctggaaaaatacgccgtgcgcgtgggcggcggtttcaaccaccgcttcggcctctacgacatggtcatgctcaaggaaaaccacatccgtgcctgccgcggcatcaccgaggccgtcaaacgcgtcaaacgccacaataccagctacaagatcgaggtggaagtcaccagccttgaagagctggaagaagccgtgaaagccggcgttgaccgcgtcatgctggacaacatggggctcgcccagatcaaagactgcgtgaaaaaattcggctccaaagtggaactggaaatctccggaggcgtcaccgctgccaacatccgctcccttgcccgcaccggagtgcagtatatttccagcggagccctcacccactcatataaatctttggatataagcctgctttttgataaggagtaaaaatatggaagaacaactgcgcaccctggttcagatgcagcaactggatgaccgcatcggtgctctgcgggtcctgcaacaggaactgccccagcagcttaacgagatcatcgagcatgtggaccaggcaaccgcgaatttgcttgcctgcgaaactgaacgcgccgaactggccaaaaaacaacgctcactggaaggcgacatcaaacaacatcaggaacagatcaagaaatacggcaaccaactctccgaaatcaagaccaacaaagaatacaaggcactcaacagcgagatagcctatctcaaggacaagatttcggaacaggaaagcctgcaactggaaatgatggatgccgaaaaccaggccacggcgcgggtgaacgaagccaaacaggaactggataaggcggaaaaagccaaaagcgatcaggaaggcgatctgcgccgccagatcgactcgctggaaggacagatcgaggatctgcgcgcccaacgcaacaccatggcccgcaccctgcccctgcagatcgtgaaactctatggcaacatgatcaaaaacaaaggcaacctggcggtggtctattgccgcaagggcgcctgcggaggctgcggtttcgtgatccgcccccaaatccgtatcgaactgcagttgcgcaaaaagataaacttttgcgaaagctgcggccgcatcctggtggaaccgttcgaaaacgactgacccctaaccaggcggatgagccccgtcctttgctgccactggctttggggtaaacgtccttgtttccttggaaccgaagaaatggacggcatgccgtttgctgctgcgagaatatatacgtaaaacaggacagggtaaggcaggaaaaaaagaattaaaccaacttatccaaacattatgcttgacagatttatagaatgtggacattagattttagagccaaaatatactggtgtaacatagtagtgatagtccatagatagagtgattacataacgacttaggggataagtgcctatctcgggttggacgcaatatccaccggtaaggactcccgaaactaaggtcaataattggaaaaacccaaaataaaaaatgggaaaaggagatatcctatgaaaaaaacccttcttttcgcgctgttgctgatcctgggcttcagtgtgatcagcaatgtctatgcccaggttaacgttaccataggcagtgggaccacaaccaatactacaaccggtccaccagccccctatggaacttggtacaaaaatttccgccagcagttcctggtactggccttggaaatcgaggatgccggcggcggaccgggtaacattaattcaattgcctttaatgtggaaaacctgaatacctgttccccgatgccgaactacactatccggcttaaacacacctcccagaccaccctcagcaccacatttgaggctggggactaccagaccgtgtacacacaggctgaattcatgcccgtggtaggctggaacacacacaccttcacaacccccttcgtctgggatgggacttcgaacattcttgtcgatatctacacatcaatcattcctggaacttacacagagaatgcctcggtttattactccaccacagctttcaatagttccctgcgctatcaaagcgacagtagcgatgccagttccgcaaccaccggcaccgtcagcaccaaccgctccaacatcaggttcaacatgaacgccctggaagtgaccaatccgcccaacccggcgcagattgtctctccgcttgacggagccgtgaacgtgatgaccgccgccacccttaactgggcttccggaggcggcgcgcccgcaggttacaaggtgcattttggcacaaccaacccaccccccttcgtccaaaacaccactgaaaacagctacgctcccaccctgggcctcaccaccacctactattggcagatagtaccctttaacgccattggtgacgcgacaaactgcccggtttggagcttcacgacaggtggcccggtgatcaccatgaccaacggcacacagtcggtgacggatgggacaacctattccttctacgattccggcggccccgacggcaattatcaaaactcagagaactacaccttcactttcacggccgccaaccccacctcgatcatccacgtgttgttcacagaattcaatacggaaaacggctgggatttcctgaagatctacaacgggccggatacctccgccccgcagatcggacccgccgccggctacaccggcactactctgcctgaagagatcattggctccaactccgtgaccttcgtcttcacttccgacgcctctgtcccacgcagcggatgggcggcagcagtgaccgcggcgaacctccagcacgaccttggcttgctgagcatctccggtaacagcactccctccgtgggcgatccctccacctacacggtggctgtgaaaaacaacggatcaaacaccgaaaacacctacactgtgaagttgatgggcaccggaaacgtggaactcgcctcagttcccggcaccaccatcgctcctcagcagaccatcgacatcggcctcacctggactccggccgaaaccggcgcgatgcagatttgggctgaagtggtgcttgctgacgacgccatcgccactaacaaccaaactgcacctatgagcatagccgtgcagccagcgggagtcgtggccattaccatcggcgaaggtaaccagaccggccgcatgcccgtggacatgtactggaagaactccctgttcgaggctatttatctgggctccgagctcaacattggcggcctgataactggcatccagttctacaataacttcgtcaccaacctgcccggcatgcctaccaatatttggatgggcgagaccacacaacccgatctgtcgggtggctggataccttcaacccagcttaacgcggtgttcgccggcaacgtcgattatcccaacggtccgaacaacatcaacatcacctttaccaccccctatacctatgcgggcggtaacctggtgttgctggtggaacgccccatggataccgactggcacagttcgagcgataacttccgcacccagactgggacccttgcagcccgttctctgaaggtccagtcggatagcaatgactacgatcctgccgctccgcctaccggaacctctccaacagcgatgttccccatgaccactttcttcctgatcgtggacgacatgggcgcgctcaccggtacagtgcgtgacgcaaacaacgttgtcatgcccggcgcgacggtttccatcaccggaacccccctcaccaccctcaccgacgccaacggcgtttacaacttcccctacgtggcgatggggccgcagacagtcacggccaccaaacacggctacaacgtcgtttcccacaacgttaccatcatcgaagatgagaccgtcacccaggacttcgtgctcacccaactgcctcaggtcaccgtgaccggccgcatcgtgggcagcgaccaacccacagttggcctggctgacgccaccatcaccctcaccggttacgagccctaccaggctaccaccaacgccaacggacaattcaccatcaccggcgtatatgccagccaaacttacgattacaccgcccaagccgtcggttaccaggctgccaccggccaagccgtggttggcactaccaacctgaacatgggcgacatcatcgtgaacgaactggccttcccgccctatcaggtggttgccactgaagctgcggactattccaacgtagccctcacctggatggccccggatcccaacgcagttggcgaatggatttactacgacagcggcgaaaacgaagacagcatcggcctcacctccggcggtgaattcagtgtcgccattcgtttcccgccctccgctcttaccgactatgccggcaggagcctccacgccatatccctcttccccggcgatatgggaacctactccctgcgcgtctggaccggcggcaccgccaccgctcccgcgacccaggttgttgaccagcccttcacagtgccgaccgttgacgtgttccagaccgttgtcctggacaaccccgtgcttatttcaggcaccgaggaactctggtttggctacaacgtttcccataccgcgggcacgtatcccgctggctgtgacgccggccctgccaccaacggcttcggcaacatgatctacaactccggcgcctggtcaaccctttatgacctggccccgtcccttaactacaactggaacatccgcggctacgtgggcttctccgcccccaccagggctcccgaactcaccccgctggccatgaagagcgaagccaacggaaacgaccgcgtactcggtggatacaaggtttaccgcttactggcggcgaaccaggacaacgagtccctctggactaacctgaccaccatcaactcctcaaccaccaccaactacactgacaacacctgggctccgcagccttccggcgtttacaaatatgcagtcaaggctatttacaccaacaacgtgctgtcccccgccgccttctccggtgaaatccacaaaggcatgatgggcaccctggccggtaccgtgaccgaattcggcaccaacgtcccgatcgcgggagccaccatcaccgccggcgaatacagcggcacctccgacgccaatggacactattccttcggcgtctatcagggagtttacaccgtcacctgcgtgaaaaccggctatcaggctgcttcccagaccggtgtgagcatcacaggactgcaaaccaccacccagaacttcgtgctcacagagatcaccctgcctccgggcggtgtggtggccgagcaagtaaacaacaacctggtcaacatcacctggatggagcccggtagtggcgccgacatctccgaaggattcgaaggtgacaccttcccgcccactgactggacccaaaccatcaccaataccggtgctggcggaacaaccggcgtgcttcccacctggtgccaggttggaactatcgccctctctcctgaggtaccgcctcattccggttcttaccaagccgcgctctggtgggattatggccatcaggatgaatggctcatgacccctcagttcatctgccctcccgccgcttccctcaccttctggagctacgtctatctgggaagcaccaacggtgaccactaccatgtaaaggtctccacgaacaacggaagcagttggaccagcatctgggacgccaccaacctcacaggcggctggaactactacgacacccccatcgtggtcgatctgaacagctatgccggccaggaaatcaagattgcctggcaggctgtggacggcgacggacagggcctctggtatgtctggttcctcgatgatgtagccgttggcaaccccacaaaaaccctgcgcttccccgccagcaccctgacccgcgtgagcgcgtccggaaacgagcaccgcgcgcctgtcaacgtgacatcaaaactcccggtcagccgcgacatgatgtattcatccggcctgacctcagccaaaaaagctgccagcgaaataactgagacccgcgatgaccgcgtcttcctcggctacagagtatggcgcttgctgcaagggcaggaaagcaacgaatctgcctggacacagctcaccaccggtaacatcagcgcgactgcctggcaggataacggatggggcagcgtgcctgacggctggtacaaatgggctgtgaaagccatctacaccggcgacgcgcaatccctgccggccttctccaatgctgttcagaaacgtaccgagatcggaacagtcgccggtatcgtccgcgatatggccaacgcccccatcatgggagccaccgtctcttgcgaagatgcatctgccaccaccaacgccagcggagcctacagcatgcaggtttccgcgggcacccacaacgtgaccgcgtccgcccccggctattctccaagcactcagcccggaattatcgtggtaaccggccagaccaccaccttgaacttccagctggctcaaagcctgatcatattcgaagacggttttgaaacctatgaaaacttcgcgctggaatttgcgccctggactctggttgacgtggatcagagcagcacctacggtatgaacacgacatcttggccaaacgcctactcgcccatggcttatatgatcttcgtgcccagtgccaccactccaccgcttaccgagcttaccgcccatggcggaatcaagatggctgccagttttgcggcggtcatgccgtccaatggaggaaacgggccgaacaacgactggatgatcacacccgaactcaccaatcctgacgagatcaagttctgggcacgctcctatacctccgagtatggcctcgagcgcttcaaagtgggaacctccacgggtagcacaaatcccagcgacttcaccatcatcagcggcaccaactacatccaggcccctgttgattggaccgaattcacctaccagattcccgctggcgtgacccgcattggtatccattgtgtgtcaagcgatgccttcatcttccttgtggacgacgtcaccgtgtcgggtaggaccgcgatcgatgatccgggcgttcctgtcgtggccacagagctgcacggaaactacccgaaccccttcaacccggaaaccaccatcagcttcagcgtcaaagacaaaggtctcgtgaagatcgatatctacaacgtgaaaggccaactggtgaaaaccctcgtgaacggcaacatgaacgccggtaagcacaacattgtgtggaacggccgtgacaatgccggtaacgctgtgtccagcggcgtctacttcttcaagatgagcgctggcaaatatagcagcaccaaaaagatgatcatgatgaagtaattcatcgggatctaacctataaaaccaagccccgggaccgcaaggctccggggttttttctgctcatctgaaagagccgtggaaaggtgttttgaggtggaaaggtggaaaggtggaaaggtggtaaggttcccccgtaacaagtcccacccgaccccgaaacaaactaccacaaagccctaaagctgcgtcatcacggcctgtcggggtccccgccaaagcgcgtagcggtttggtggggtgacctgacccaggatccagtcttttggaaacaagcactcagccacaaaacaaaccatgccagacaatatactgcgtcatcacgggcttgacccgtgatccagtctttttgaaaaggcagtggaaaggtgaaatggtggaaaggaagcaaaaaatccaacagactaccctccgcgtcatcccgggcaaacgggggcccctctggggtgtctgacccgggatccagtcttttggaaacaagcactcagccacaaaacaaaccataccagacaatatactgcgtcatcacgggcttgacccgtgatccagtcttttaaagcccaatcaagcacccaatacaaaaaatacagatatcaattccttgctaaccgcataaagtatcaatacattccgcaataccattcataccgccctcctttgctgcgactggattttgtgccatcatccttaggtcatccttataaattataaggttgacctaaggaatacccactccagagtgccggatgcaaatgaggcccccatattatataggtgctacgagctcgtaaagacttattttggtttgcattatcacaatcgcctgtcttcttccgcatgaagtccaagagagccaaagcgtctggtggagatttgaagcctgtcaaggctccttgaactccatgctggctgagtttggagtttaagccggcaaggaaggttgtatggatttcgccaaaccagaggctggcttagacttcaaacggtcttcaaaagactggatcacgggtcaagcccgtgatgacgcagctttagggctttgtggtagtttgtttcggggtcgggtgattgtttccaaaagactggatcccggctcaagtcaccccaccaaaccgctacgcgctttggcggggaccccgacaggccgggatgacgcggcatgtagcttggatggcgttgtttcaggactgtgtgttatgatatggctttaaaagactggatcacgggtcgcaggccgggatggcgcggcatgtagcttggatggcgttgtttcaggactgtgtgcttgtttgagccttgaaaagactggatcacgtgtcaagaggttcacgcagattgacacgggattgggctgccgaagtctgttcggcagaggcaacggagttgcctgtttggaagagacctccggtctctgtggcaaacggactttgccaccccccccatggaaggcaatcccagacggcgctatggcaagcgccgctactttgtactggcggtcgctgaaccgccatttccacctttccacgggtgtttctaaaagactggatcccgggtcaagcgtgcgcttgcccgggatgacacagaatataacttggtggacttgttttttggggaacctttccaccattccaccattccacctttccacctttccacctttccacctttccacctttccacgaccatttatagaccactccgtgtaaatccaacccaaaggagccacccttgtttcctgcctgttcagcgggcagacagcagtcgtgtcatgaaagcttgtccagttcctcgcggacgttttggcagcggggatagtctttgccgaaggtgttttcccagatgctcagcacccgggtcagcagttcccgggcggtttttgcgtcgccctgcctggcgcgcagcctgcccagcgaaaagaggtaattggctgtctgggaatggttatcgccaaagtggaaggtatggccgtctattgcctgtttgagcaggggttccgcttcttccaggcgtccctggcgcagcagcacgctgcccagatttccggcgcagaccgccgtgaaccagtgtccctccgggaagaggctttccatcatttccagcgcggcacggagcatctcctcagccttgtccggcctgtccatcagactgtaaagcgaagccaggttgttcatgcggtctgccacattggaattgggtccggggcgtttttcgatattcagcgagcggcgcagcagtttttcagcctgcgggtagcggccggtgtctttgtaaaaacgtcccaggttattcagatagggggagaggcgggggctgcgtggcccgagctgccgggttctggcgtccaccaccttcagatagagcggctcggcatcgtccatgcggtgcatatagtgatagagcagggccagatggaagagtcgttcgatgtgttccgggctgtccccgccccatgcctggcaggacaactccgccgccagcagcatacattcctcaatctttaccatcagcatacggtcccagaagtaatcggacgccatttcatagtaattggcggcttttttgagttcccctgcagccttgtagtggcgggcgatctccgcggaatgctctttgagagcctgttcaaagacggtttccattgcttcggcggccgccaggtgcagctttttaagctccttttcgcggatgctggcatagaccgccttctgtaacaggctgtgggaaaagatgtaaaagagttcgtcggcatcctgccagattttccgtccccccgccttgcccagttgctggatggggttgccttcgagcatgtgggagaggaggacaacattgaagcggaagcccagcacactggcgccgcggacgctttcctgaacctttttggagagccgtgcaatgcgccgggaaatcacctcgtcgatgcctcccgccgccgcttccaagccttcttgcgctatttcgccgtgggggctgagcagcttgttttccagcagataggcggcgagttgttcggcattgaaaggattgccgcccgcgcaggcgtggaaggcggaaaaagcctcgcggggcaggcggggaaggcacagcagattgaggtagagcttgcggctggcgctggagttgagggaacccagggggaggctttccagtccctcttttccgaggctaagctccgcgggcagaatgttgttttcagtccgcgcggtagccagcagaaagaacgggcgcacgccgtgctgccaaagcagttccaggaattggtggctcagggtatcgagccattggatatcgtcgataaagataagcagcggggatttggagcacagccagcgcagatagtccagccacgcctgctgctgacggggcagcctggcttcgggggcgatcccgcgccagggcgagccatcccaggaaaggttcagcagcgaggcaagggcggcttcgcattcctgccccagcctggagcctctggtgcgcttgttccacgcttcgcggaaacgctgcaccgcctgagcgggagcctcgtcctccaaaagccccagactggcacgcagcaactgggttacgatgtccagagggaggggggaatcctgcctgcaagccagcagatacacctgctgccgcggggtttcaaaggcgcgcaaagcttcgcgtgccaatctgctcttgcccactcccgccgctccatgcaccaccattgcctgaggcgaggaggctgccaaaccttcgcgtatcttcctatgcagcagagcggtctccttctccctgccgatcatgcaaagcggttggcaggtaatcaattgtcccggcagcatgccaaggcggtaggctcggggagtagctcttgaggcggcttgctcccttttgagaggggtgaagatgaaggagttgtgctgttggttgcgcaggttgtggtcggcgagggcttcgccgggacgggcgagctccaggagcttctgggcgcgggtgatggcttcgcccgggaagaaggttgccttccacaggtctttgccagctaccatggagaagatatagccggtgcagcaggcggcgcgggctttgtggcgcgtgacggcttccaaagccaggcggcaggcgcgctgcattttattgaccttgttgtggggaaaatcgaagagcaggatggcatacaggcgtttattccgcacatagatggctgctaaaaaggcgtcgtagatcaccgccagcagttccaatgcctggatggttggctccagggggccgtccggaggctcgtccaggctgaggcagcagcaaacgctgtgccggacatcaggtgcgggattgagtctgtgaaagcgggaatgaatgaagtggtggccgtgttgcttgcccaggcgcttcctttccggcgtatccggcaactggggaaagggcggatgcactgcgtgctttccaggccggacatcagacccccagcccagtctgctcagggcttggggagagtaatagggttggttgggccggccggggttttcacgcaggacatccagttggggagaccagaacacatattcaaattgcagtgggttctcaaagattcgccaggacagtgtgccgaaacccacagccaggcggattacatccggcattccatgatgggggctggcgtagctgttgatcgcgctgatggtgtgattgatgcgtgccagcagcgccgcgatctgcaccggagtgctttccggcaacagggcgtggatgcagtttccctcatactggaagagcagtccgcctgagtgcctgatcatgctcagcatcctttcataggcttcggtggcggtggcttccatactgtcaatcacctgccgccgctgcttgagccttattcctttgatattgtaagtggcaatggtgcaaaagcgcagaatatagccggtgatctgcccttgcaggatgttttgctcatactgctgcaggatgtagctgggcaccatgcggttcatatctggctacctgcttttcctggcttgactaagctcctttctgcttacttatcccccaggctcagattggcgaaggcggtgagggtgatctccgcgtccgcgctttccagatagctgacgcgcgcctggtcgcccgcgcgggtgatgggcagacggctgctcaggttgctggaggcaataaagattttatccggcgcttccgccagggtgagatagtagtaggtgcgcccgtccgtggtatcagagccaaagcgggcgatggagcctgtgagggtggcctgcttgtccgctgcctccggcgatatccccgtccggctgccggccagggccatctgatagctgtcgcgcgcgctgcgcacgctttcacccactcccaccagggagaagtcacgcactgaaacgaagctgaacatcttgatcagtccggcgctgtccttgagggtcataaaataggtcggcttgccgttcatgttcaccaggatggggaaggtggcatagtatttaaagttttgcaccttgccttcggcggaacgcatggcggcagtctcggtggcgccggagaccagatagaggtggctgcttttgttgcgggtgtccgtgagcgcaaagcccaccgtcccctcgtccgagcccacgctggtgaggccggagtagaaatagctgcgctgatcgcggccatagatcacgttgtagccgggcgtcacccgcagcaggtcgcgcttgccgaacacgctgttccagaagccgtggacatatttgccccaccaggaaagctggggaagcacaaagtaggaaggctggatgcggtcaacccaggcgggaatcttgctgtcgtcatagatgccgccgctttttttgaggggaaagtatttgatctcacccgtgccggcatgcacgatggcgagtccggtggcttccggggcgttcacgccgatcttgtgggtgtaggtggttatcgtccagtagggttcgccattgtcgtccagttcaaaggtatcgcctgccaggccgatgcccgcgaagccgttccaccagagatggcggtagaggtcttgcccgaagaaggcattgctctgatagcggatttggatgggtttgcctttcagctcgcgcacaaaggtgatatcctgcggattggtggccgagaccttgatgtagcccggggtgcctttgcttgtgttggtgatccacttccagaagccgctgtgcagcagggggcagacccagaagagcttgccatccaccatctggatggtggggttgccgagcaccacccggctgccgagggcaaagtcctcgcccagcttcttggcggccaaatccttggcgaaagcggaatccaggatcggcacctgatccagattgaccggcgccacaaggtcggaaaactcggtcttttccacctcgccgatcatgcggcggtagctgccggaattgaagatgccggaagagaagaagggcgccaggatcagccacagcgccagaaggggatagaccacatagagtatcttgcgcaggcgccggattgccagcagcggagccaggcagatcatcagggggacgatccagtccaaaaaacggatatgcaacaccggaagcacaaagtaaagcataaaacccagcagcagaatggccagcactatggcaggcagggctttgatcctgagcttgggaaactgaatcacgacaggtttgggcgtttgttgttgaaacatggtaacctccctgaactaagctttgttttgatactatgccagatggcggcggatttgtcaagccggaatcgtggccgcctccactggcagaatggaaaaaagtggactcggctcgaacggcaccctatccttgcggatacagaggcgcgaccgcccgctcaaacactccctgaaccttggaaatagccagcccgtaattggtgatcggcactccgcgccgctgggcttccacgatgcggcggctcatctccatctggttgagcatgcaagccccgcagtggatcaccagcgcgaagtcctccagattgggcgggaagtcgtgtcccgcgtacacttcatactccagttccttgcccgtgaactggctcagccagcgcggaatcttcacccgcccgatgtcgtccgcctgcacgtggtgggaacaggcttcggcgatcaggatcttgtcgccgtcgcgcagcttgtcgatctgcctcaccccttccgccaggacgtccagatcgcccttgtagcgggcaaagaggatggaaaaggtggtcatcttcacctcggggggcaggtcattcaccaccttcagcaccacctgcgaatccgtgatcaccagatcaggcggttccttcagggtttgcagggcataggccagttcccgctctttcaccaccgtcaccaccgcgtcgtgatccagcagttcgcgaatcacctgcacctgcggcaggatcaggcgtcccttgggcgcggcgaggtcgatgggagtcaccagcagcaccctgtccccggccttcaccaggtcacccgccagggggcgttcctccagcagatgggcgggcgccagcttgatcagcagttccttggcggcgtcgatgttttcccccttgagggcggagacggagacccagggcaggccccgttcctcgcaccaggcgatattggcgggggcaggctcgcgcagatccctgtggttaaagaccattaaaagcggtatcttcatctcgcggatgcgcttcagggaggacagctcgctctccgcgaaggggcggccatcgttcacaaacacggctatgtccgtgcggtaaagtatcttataggtggcgagcacccgtttttcgcccagttcgccgctgtcgtccagtccggcggtgtcaaagaaggtcaccgggcccaggggcagcagttcatagcgtttgtccaccgggtctgtggtggtgcccggggtgctggaaacgatggcgatctcctgtcctgccagggcgttgatcaaggacgattttccggcgttgcggttacccaacagggtgatgttgacgcgttcaccgcggggtgtgctcatctatcttctcccaaaaagtcttgcggctcgcggccgctaatagcttttattatcagttctttcatgtttctttccttgtcgggctggataccagcccatgtaaaataatatatgtgaaaagcgtaaatctgtcaagcaaagagaattctggcagacggtagccagtgcccaggggtggcaaagtccgtttgccacagagaccggaggtctcttccaaacaggcaactccgttgcctctgccgaacagacttcggcagcccagaaacaaagcacaactgaccaaaaaacgtgtcatcacggcctgcgagccgtgatccagtcttttaaaatatccacaaattacacaaattaacacgaattatcagaagtggaaaggtggaatggtgaaaaggttcccccgtaacaagtcccaccaagctatacaccgtgtcatcacgggaagtcggggccccctctggggtggcttacccgtgatccagtcttttagaaacaaccacccaaccccgaaacagaccatcgcagacaaaaaaaccgtgtcatcccgggcagcgacccgggatccagtcttttcggaacaaccacccaaccccgaaacaaaacataccagaccaacaagcgtgtcatcacgggcttgacccgtgatccagtcttttcggaacaaccaccaaaccccaaaacagaccacgacagacccaaaaaccgtgtcatcacgggcttgacccgtgatccagtcttttaaggaacatccgcgtaaggttataaaaaaacagccaccatttcacctttccacctttccacctcaaaacacctttccaccaacaatccccccatatatataggtgctacgaccccttaatgccaggcgggaagcggaacccagggcaagtatataaatatacttgcccataattgcgcggccatgagctggctgtcctccatttcccctcgcgcgcgggtggctctcatttgcatccgtcgttttggcgtgagtcttccttaggtcatccttataatttataaggatgacctaaggaagatggcttaacctcctgtggcagtgaaggatggcgctatgaaggatattgcggaaggtacaggtttatttatgcggttgtcaaggaattgatgccggttgtttccagactggctggttattttaaaagactggatcacgggtcaagcatgcgcttgcccgtgatgacacggttttggggtttggtggggcttgttttgggctgcgtccacaatcaacacggcaccacgagagtctatctggggctcctttccaccatttcacctttacacggatttcacaagagaatgtcagatcacaaatagcataaaacagcttgatgaaagcgaattggtatgagccgtgatccagccttttagaagcaaccacccagccccgcaacaaaccactatcagaccaaaaagcgtgtcatcacgggctgtcggggtccccgccaaagcgcgcagcggtttggtggggtgacttgacccgtgatccagtctttcagaaacaacggattacaatgatatagataaatgaacgggcagccgcccttccaagtccgataactaaagaaccgccgcgcattacacacggcggttctttcccgcaaatgggttcaaaaggcgtttccgcctcagttcagagcgcttacccgatagaacctgaacgagttgcccgcctggatttcacaactgaccaggccgtcgccggcggtggggtcgtggacggcggatgtcagcacggtaaagggcccggtgggagccggagccgaataaacgcggtaaaatacggcgttgggcacttctgtccacgtcaggttcagggctgaaactccctttgtgaaggaaactattaccggcgaggtcaaagccgaaccctcgccaaagatgatctgcctgccccagacaccgtccagatatggccgccagatgccgatttggtatgggttgacagtttggttggtcaccagattggcgttggcgaggctgccattgaaataccattgcgccgggcccagttcggagaccagttggcagccctgttcggtgttgatggttcccgcgttgcgcacatattgatcggttgtgccgttcaccagtagccggcgaacgccgatcgtcccgtaattatagaggtcgccgcggatctgggtttcaagatatcctccgtgggtatggctccggatcgtgccatagttttccaacttctgggtaacgctgaaggtcgggtaatagttcatataattgaacagggtggcgttattgatgagtgttcccaccgtgacggtccctatcagtgcgaactcgccgtaagtgattatatggtcggcactgacgttttccaggtagacactgttcagattcagggcgccgcttgctccgcccgagatggccgcgttccggatgcttccgccggactggttgagcgtgaaacattcatccgcggcattgtagagattgatctggttgccgctgaaatcgatggtggtgccgctgaacctgaggttggaaatcaatcgggcgggccctgtggaactggaagtaaagttggtgcaggtgatcgccggagcgtccgtgctctgccagaggtggtggatttgcgatcctgccaggtgggtcaggtggttgttgagcgtcccgtaattgtagatgccgccgtaaagggtaagttctaaacgtgctccatgggtatggttccggatcgtgccatggttgtccagccgctccatgacgctcaggtatcctatttggtctattttattatagacctcgccgttgttgatcaggtgtccgacattcaggttgcctgcgatttccaccataccctgcaatacgatctcgtccgccgctgaattcttcaggaagaaaccgtcgtggcaagtgatgctggctccgttgccgcccacgatctgggcgtcctgcagaaacgtcatgccaccatatccatagcagattatatggtggacggaactgccgttcagcacaagggaggcgttgttcatcctgatgctggtgcctgacgagaccaccagatccgtatccaataccaaggggctgccgggataaagatcctctaagaatttcgggcagaaagtccctgaattgctcagatgctgtgcgttcgtcccgctcaggttcagatgccagggtgtcagggagccagaattggtaatggcgttcgccaccgtgaccgtaagggttcccggatagtagccccaacgatagctggtggttgtgccgtgatttgtcaggctgccattgactatgacctcggtttgggagttaccccccgggttcaacaaccatccggtaccactgaccgtcaggttggcgcactgatggggagaacccgtggtgtccgcgtaaacggtgctgttgataactacatcatccccggagttgggcacccttccgccagcccaggccgcggggtcgctccaatagccgccggcatctgaagaatagacggtcagggccatgatctggcccagtaaagaaagtaaaaacaatactgctaaagcgtttttcataataaactcctttggttggctttcatagacaggctgtttaattacgtcaagagaattgttgagcccgtcacgattgactcagggtcttgtcgagacaacaatgcttccaggtcattttgtcaggcataatgccgtccatgctgaatgattcattgttaatgtccgggcaaatcgacagagtgacggggtttgaggttttcggtggcgggtttatatagggagacctccctaatttgattattcccgccctaataatcactcaaagcaaatatcttgacaatgatctttattcataatagaaggtttccattgagcaaatggagcatattatgtacaatcttctttgtgataattgggtaaatgtgatctatctttcgggcaaaccagatagaatatctttagtgcagactcttaaagatgcacacaatctgcaactggcatacagcaaccccatggacaggtttgctgtcttcagattcctgcttgctcttggctactggtgtttcgctaacaccaacgaggcccctgaacctgataagccgcttccggtctcctggataccctggctggaggaaaacaaggagtatttcgagctctttggggatggcccccggttttaccaagacaatccaagttccaggatcagagccattaccgaccttattcatgagataccaacagctcataatctatgccatttcaatcatgtcaccgactatatcgatgggctctgcgaagcttgctgcatcaagggactgctgagattacctgtctttaccactgtcggtggcagagggataggtgcgggaatcaacaacactcctccattttacctgctctggcatgcaaatgacctcgctggcatgctggctcataattggcaaccctgggataatatggggattccggcatggttgggttcttttcaaaaagaaagcaaggaagtgggcttacttgccggaatgacctggctgccgcgcaaggtgcatctgcatgatcccgtcccaggtcaggcagcatgtagttcctgcggcttaccctccgaagctctcgtctattcctgcagcatagaagtggagccagtaccggaaggccttgagtggaaagaccctcatggtgtttacaccgatctgaaaaaaagcctccagtccaaaatcaaactgatgtccaatgatagatacactttcgcggaccgggattggtatagtccgctgttcagctatttgcgcgcggaaggaaactccagaaaaggaaaactctggttggttggatttgccagtgataaagcaaaaagcatagacatctgggacaagatcatcgagtttgagggaactgatacaaatgatgagttgctggctcaattggcaaacagggctactgcccttaatatcatgcgcaagatatctctcagaggtgatttcaaaaagtcagtgggcacaccccagattgctgacattatcccccacgccgaaagcagaattgccatcaatgcgggtaaaatgactgagaacaggggctattcctggcaggatgccgatgctgaatacagagaactgctcacaaaggttgcgtgctctttggagccggctcaaacagtggacgccaggctcaagagaggtaaattcatttcccgcaagccctggccaattataccagaatccaaaacaaaacccgcagagggggaccaaaatgaatagaggaacagttgacttcattacaagcctggagaacctcaaagaaggcgatttgggcattcttagaaaactcaggggagcccggcttgatgaagagcttcccggatttgacctttttacagccctctggtggcctttgcggcaaaagaatcaacgcgcccccaagcgtgaagtggcttggttgatcgccaaactttttgctgaattccgctttgaacagcgcgaggaagccactttgcccatacttatgggaagcatttgccggaaacttggaccaaaaaaggaattaccccgtgtactggcacgttttgatcaacttgcatcgcttgacattatgcatatggaagaaccgctgttggtcatcatgggtattttgcgaaagcaccagcaggtctactttgactgggtagatctgacagatgttctgtcattttgggagcaggagactgtcaaaagagaatggtcggattcatttactaaagcatacaagatcaacaaggaggattcagatgttgattgaaattcatatgattcagaatcacagcccggcaaatcttaaccgggacgacttgggcgcccccaagacctgttatttcggtggagtattacgttcgcgcatctccagccagtgcatcaagcgcagcatccgttttgccccggagttcgcagaccttagaggaggtatccgaacaaggcgtctggcagagaaacttgaggaaatgctggaaaacaaagataagaagctggttgcaaagttcctggaagcctgtggagttaaaaccaaatcttccaagaaagctggaaaaaagtccgaacagatacccgcggaaaccgatgaagctcaggaagagcagcaggcggctgatacgtcggatatgctgatttttaccacctatgatgccctacgccaaatggccgtcctgctttccaactccaatctcggtgaaagtgaaaaactgcttgggtttaaggaactacttacaaactgcgtccattctcctgatatagcactttgcggcaggatgttggagaccaaagagcttaaaaacactggcgtggaatgcgctttgcaggttgcacatgcgctttccacccacattgccaggccggagatcgactactttgtagcggccgatgatgttcctggtgaagacgccggagcgggtcatattggcgaatccatgtttgcctcagcctgtttctacaaatacttctccattgattgggagcaattggtcaagaacctgaaaggagacactcatctggcagcccacaccgtgggtgcctttctcctcgccgctgccaaaaccaaccccagtggcaaacagaacagcttcgccgctcataacttgccagatggcatacttgtcgagttcaaaaattcccctattagctacgccaacgcattcgtcaggccagtttccctggtcaaggattcggacctggtggagcaaagcatcggccagctttccaactacgtgaacgacatcaggcttggctattatgatgagcaatccccagttatcagcttctggttttctccaaacaatcgctattcccttggcaaagagcatcccaaactggcctccaggagcattggcaacctcaatgagcttgtaagcgccgtgttggattatattggcagcttcgagtgggaagaagttcggaaaagcaaggcttatgttggcgggtgacatgagtgctccacccaataccttattcttgcgcttggagggggctttgcagtcctggggcagcaacgaggctaagtttgctttgcgcaggactgccgacgctccgacaaaatctggtgtcctgggactgctctgcgcggcaatgggaattgggcgcgcggaggctgctgattcatggctcccaaaacttgccaacctgcgcatgggcgtgcggatagaccgccccggcatacgctggtgggatttccacactgtgggcgcgggacaaagaatgcgcatggcagagctgaaggcacccaagaaaccttccatggttggagcggccctggctgagaccttgacaccaaacaaaatacaaaccagggcagagactttgctctcacgccgcgaatatcttgccgacgccagttttctggtcgccttgcaaggtgagccggaacttgtggaaaagctctccaccgctctggccaagccggtctgggctatttatctggggcgcaaatcctgtcccccttcacgtcccgtaggcgagcatcctccgggcttttacaacactttggaggaggcgctgtccgcggttcccctgcaaaagcgctggcacaatgaacccctgccgcaaacactgccttgcgtcatggactggattcccagccgtgacggagaacatgcacctgatgacgcagagattcattacgatctgccggtttcttttcagccgcccagacatttgccgcgcttcgtgatcaggcgtgagctgtttgtgggagaggatgtgcaagtgagcagggaaaccggaaccaacgtttggaggcccaaaggaacccgggcggattatagcaattccgagtataagaaggtcagggcggagcggcttgtgatggatcatgccgcgtgcatggtgtgcaaagctcctgccacgacagttcaacacgtggattaccgcagggcgggaggcaaggaagtaccggaagatctgcgggcgctgtgccgcctctgccacgacgcctgcaccatgctggaatacggttccggcatgaccaccgatcgcatcgacccctgcgaccccatctggcgggagcgtattttgtcaaagcgcaaagaaatagtcgagttccgttcgcgcgggcagcgtttccgcaaaatgaaaccagaggaggaagacggatgatctacttgtccaggctattgatcgatactggaggcaatccagaccgcccccgccccggcagaaagtggctggacaatgtctataacgtccaccgccgcctctccatggcgtttccttcaggtttacgccgggagcaggatccgcatttcctgaagcccttttcgccaaacgacttccaaaaaactcccttccttttccgggtcgataacaacatcgacggaaacgataaaagggcgattattatcgtccagtccgttcttgagccggattgggattattgcttccaaaacgcgcttgatttcctggccgcgccgccggaaacaaaggagtataatccagagtttaaagcgggacaactgctgcggttcaggctgcgggtaaacgccagcgtacgccgtcatattcctgaaatggtgcaacaggacggtcaaaccatagaaactggcaaaatcctgcacaaaagggtttctcttacctgggatgcttcttccaccccggatcaggcccttgccgactggctggctgccaaaagcccaaagctgggcttcacccttcagcgctgtgagcttcttcaactgggttgggtttatggctccaagccagaaccaaaaaatgtcaaagtaaaggaacaggggcagggctactggcgtgaacacacatacaatcctctgcgcttccgtgcggctctcctggagggagttctcgaggtggatgacccgaaactgttcctggaaacgcttagcagcggcattggaaaagcgaaaagtttcggctttggcctgctgtcagttctgccaatcaggaatgatggataaagacctgcactctattccccggatcagagaccggcttagctatctctatgtggagcatgccaaaattgaccagaacgggcaagccatcgccattcacgacgctctgggtgaaaccccggttccttgtgccggcttggctatgctgatgctgggaccgggcataaccatcacacatgcggcaatactttcactggctgcctgtggctgtctcgtagcctgggtgggagaacatggcgtcaggttctatgccgcaggcacaggtacaacccgcagcgctgtcaatcttatgaaacaggcaaagtactgggcagacccggttttgcatctacgggttgtacgcgccatgtaccagttaaggtttcaggatgagctttctccagatttaactttgaaccagatcaggggcaaggaaggtgcccgggtgcgcgatacatatttccaactctcccaaaagtatggtgtgcccatgcagggcagaaactatcaaagagacaactggaataaagcagaccccataaaccgggctttatctgtggcaaactcatgcctctacggcatatcgcacgctgccatcgttgctgcaggattctctcccggattgggctttgtccacactggcaagcaactgtcatttgtctatgatatcgcggatctatacaaaatggagatggctgctcccgccgcattccgggcgaccgctgaagggatcggcgaactcgaccgcagagtcaggcttgcctgccgtgatgaattccacaggcagaatctactcaaacgcattgtcgctgacattagttctctcttcggtgatattatgccagaggatagcccggatgactgttttgccgaagaaccagccttgcctggaggactctggtctccagatggagaagtttccccaggcggcatatcttacgggcaggatgatctgccaaaggaagattgatggtggttttggttttggaaaacgtgccaaactccttgcggggtcagatcacacgttggctgctggaagtaaaggcgggggtgtttgtgggtaaagtctcagcaatggttagggacaaactgtgggataaggttagaagcaattgcagcggtgggacttgcctgatgatctggagtagccaggccgaacagggttttgatatcgaattctggggtgccgcatcaagagtcgttacggaatgggagggtatcaaactaatgaccaaacatccttgaactaaggcttgaaggagctcaatgacctgttagctctctattgatcaagtgtattccccacgcatgtgggggtgaaccgaagctccgcgcctccatcatgagccacgttacgtattccccacgcatgtgggggtgaaccgagatctcgctcatccacggctgggtggaagatgtattccccacgcatgtgggggtgaaccgccgctgcagaacatctttggcgggcaactggagtat

SEQ ID NO: 944 - DNA, 109993 bp, Artificial Sequence
  Synthetic Oligonucleotide
catcagcgcatggcccaattgggcgcggggcatccgcgccccgcttaaatcggcctctttcagattgctgttggccaggttcgcttccgtcagatccgcgccttgcagatgcgcgccggccaggttggcttcatcgaaatggcatccggcaagcgcctgttttcccatccgtgcgccgcgcaggtcggccttgttgaagcgggcttttcgcagaagggtctggcgcaggtccaagccctgcattccggccagatcgagtatggcgcccgaaagatcagcatcaataaggtttgccccttcaaggtttgcgcccgtcaggtccgcgccttccagttttgcgcccaccagaatggccccgcgcaggtccgcgccctgaaaaccggatcgaatgagcgtggcccgccgtagttcggcgtggcgcaaatccgcgccccggaaactggtgctcgtcgtcatcgccccgttgagattcgctgcgcgaagatccgttccggcaaacgatacgccgccgagccgtgcctcgcggaaatcgacctcgtcgagttttgcgccggtgacgacgacgtcccgaaaatcggcatattccaaatttgcccgcgaaaggaccgcatcggtcagatcggccccggtcaggaccgtcttgcgcagatccgcccctttgagaatggcgccgcggaggttggcgcccgccaatcgcgccatcaagagattcgccccttcgagattgacaccgcacagaatcatccgatcaagattcgcctcggacagatccacacgggtatatccgctgggtccccgccacgcattccacgcgtgaggaccctgccgcaacactctcaggcattccggatcggccatctaccgtttctccccgcgtttccccgattatacaaaggcaagcccttggcgacaagactattttgtcgggccttgctggacaggaaagtctgaaataccctatgatcgtttgaatttggcggagagatgggtatggactggatttgcgaagcggcaaccttgcggggatcggtggagatccccggatcgaaatcgcacacgatccgcgcggtggcgattgcctcgctggcggagggtgagagtgtgattcggcagccgctcgactcgcaggatgcgcgttcggccgttgcggcttatcgggcgttgggcgcggccatcgaaacgggcgcggacgcgtggcatgtcaagggctttgccggaaaaccgcgggttccggacgatgtgattgatgtcggaaattccggcactacgctcaatatcgtgatgggaacctgcgcgttgattgaagaaggcgccgcggtgctgaccggtgatgcacaaatccggcgacggccttccgggcctctcgcggcttccctgaacgatctgggcgcttccgttcgttcgacgaggaacaacggctgcccgccatttgtggtggcggggccttggcgcgggggcgatacggccatcgaggccgtcagcagccagtatcttacgagccttctgttgaatgcgccgttggcacaaggcgaaacgcgcattgatgtggcgctcttgcatgagaaaccgtatgtggaaatgacgcttgattggcttcgccatgagggtatcgtttggcatgcgaaagggtttgcggcatttaccgtgccgggcggccagcgctatcgcgcattcgaccggaggataccgggcgatttttcgtcggcgacgttctttctggctgcgggcgcgttgcccggcaacgatgtctcctgcgccgggcttgacatgaacgatacccagggcgacagggcggtcgtcgaatatctccggcgcatgggcgccgacatcgaaaccggttcggagacgattcgagtccggggcaacacgttgaagggctgcgatctggatctgaatgcgacaccggatgcgttgccgatgatggccgttatgggttgtttcgccgagggcgagacgcgcctgctcaatgttccgcaggcgcgcatcaaggaaacggaccgcattgccgtaatgggacgcgagttggccaaaatgggcgcgcatatcgaggaattgccggacggcttgatcgttcatggcggcgcgttgcgcggggccgaagtgcagggacatggcgatcaccgcgttatcatggcgctggccgtcgcggccagccgcgcgacgggtgtgacgcgcattcatggcgcggatgcggtggccgtgacttttccggccttcgccgcatcgctgtcggccatcggtggaattgtggaattccagacatgatcctttttcccgacatgcggccgatgggttctactttgtttccccgggagtgaattcgcgcaaagcgccggaaaagaaaggtatatcgccgtgaagattgtcatcatgggtcccaaaggcgctggaaaatcgtccatcggccgggtcctttcggccaacacgggactgcaaaccatagatacggaccgcatgatcgaagatctacacgaaaaacgggacgggcatcgcctaacctgccgcgagatcttcgccgaacatggagagtcctattttcgagagttggaatgcgacgtggcgaaggacgcgaacgcccatgattggcatctgataattaccggcggatccatcatgctgaatccggattcgcgccgcctgttgcgtcacgacgccttgctgatctatctgattgcgtccccggaagtcttgtgggaacgcgcaacggcccatgggacgccgccgtggctggaagggccggagggccgggaacgattcacgcgggaagtcgcgtttcgcgatgaagtgctgcgaccgttcgcggacgtggtgctggatacgaccgaaggcacgccggaggaactggcggaagaggccggcgcccttatcaacgaggaactggccattctgagccgatccgcgaacaccttcggtgaaattatccgcctgacgacttttggcgaaagccatggaccggcgattggcgctgtgcttgacggcattcgacccggcatcgagatttcagaggaaacgattcagcgcgaactcgaccggcggcggccggggcaaagcaaggtcgttacctaccggaaggaatccgacacggttcatatcctgtcgggtgtgttcgagggtaaaaccaccggcgcgccgatcgccatgatcatttacaaccaggatcagcgttccgaaaattacgatgatctcaaggacgtgttccggcccggccacgcggactttacgttctaccgcaagtacggcctccgggaccatcggggcggcggacgttcatccgggcgcgaaacggcgtgccgagtggccggcggggccgtcgccaaggaacttttggcaaggcgcggcgttcgtatcgtggcgcataccgtggaattggccggcatccgcgcgcaaacgtgcgactatgatgccatcgagggcaatccggtgcgttgcgccgatcccgaggcggccaaggcgatggaagaagccgttttggccgcgcgcaaggactgcgattcggtcggcggcatcgtgcagttggaaatccttggcgtgccgccgggactgggcgatcccgtcttcggcaaactcgatgcgcgcctcacaagcgccatcatgaccatgggcgcggtgaaaggcgtcgaagtcggcctgggttttgccctggcgcggatgcacggcagcgagtcgaacgatcccatggccggcggaacttttgtcagtaaccattgcggcggtattttgggcggcatttcgaccggcgagcccatcgtgatgcgcgtggcggtcaagccgacctcctcgatagccaagccgcagcgcacgttaaacatttcaggcgaggactgtacgatcaaggtgaaaggacgccacgatccgtgtatagttccgcgtgcggtgcccgttatagaaagcatggccgcgctggccattctggatttatgggaagttcaggcgcggctgcggcccgaatgggggcgccaatgggaatcggacagcgttgcctgatgtggccgcgccggcaatgcgaagcgaacaaccaaggagaataaaacatgtttggatgcacctacggcacattgtttcagaccaccgtggctggcggcagttaccaggaagggctgacggttcacttgcagggcgtgccgcccggcctgctcatcaccgaagcggaaatctatgaagccctgctgacgcgcaagcccggacaaagcgaactggcctcgccccggcgcgaacccgacgtcccggtgatctacagcggcgtgaacgcagcggacacaatgccgggtttcagcaacaaaggctgcaccaacggcacgccgatggtgatcctcattccgaacctcgaccggcatttcgagcacatcgaacaataccaggtcaccaatcgcacaccgagacccggccacgcgtcgtatgcctccttcatcaagtacggcgaatgggacgacgccatcggcgcggggttcttcagcggacgatacacctcgaccatcgtggcggcgggggcggttgcgcggcgaatcctcaaacaacacggcatcgaggtgttcgcgtatgtcaaagaggccgcgggcgtgcgcgccgccgacgtgccgcatgaggcggcgcgcgcgaaggtggacacgttccgcgcggttcgcaaagcctatgatccgatttacgattgggtgtacacatcaggccggatcacgcccgatatgcgtttcctgcataagatgtccgtgttggcggaactcgaacgcgacttgatcgccattcaaagcgcggccaagcccatggacgcccaagccattcgcagggaacacggtattcatccgacgatgaactgtcccgacacggaggcggcattcgaaatggaaaagcggatactcgccattcgcgacgagggcgattcaagcggcgggctggtcgaggtggttgcgacaggcgtgccgacgggcatgggcgagccggtgtttcgcaaactcgacggcgaactgggccgcatgatgagcatcggcaccatcaaggccgtcgaggtcggcgcggggtatgccgtgaaggacatgcgcggctcggaatgcaacgacgccatccgcgccaaggacggcaacgtctacttcgaatcgaacaacgccggcggcattacgggcggtctggcgacgggacagcccatcgtggcccggctggccgtaaagccgaccccgaccatcgccaaggatcagaaaacgattgacaaggtttcccgtgaaaatgccgtcctgagcgccgtcacgcgccgcgatccgacgattgtcgcgcgcgtgtggccggtggcggaggcgtttaccgcgatgatcctcctcgaccattacatgcagcaccgggcctaccgggcgttgtgggcaaaataaaaaccgggttgaacagccttcggatgtcttcgcggtgcggacaggtcccgtccgcgccggcctcttcaaagtttgaattgcggggcattgcggaggccgatatcttccaactcgaaaaactcccgcgtgctgaatccgaatgcgcgggccacgatagcggcgggaaaactctccagcgcgttgttcagttcccggacgttgccgttgtagaaacgccgcgcggcgccgatgcgatcagttcattttgcagcgcaagaaaaggggcgctcgccttcaagtccgggtagtgttccacgcgtgccagcagtcggcgcatcgcgcccaccagttggttttcgagaaacgcctgcctggatggcgcgcccgtttccgcgacgcaaaactggcgcaggcgcgttacctcttccagaacgccccgttcatgccttgcgtatccctgaaccgtccgaaccagattcgggatcaactcgtaccggcgtttcagttcggcgtcaatgttcgaccatgcctcgatgcaatgattgttcagccgaatgaaacggttgtacatcgccagtagccacaaaagcggcgccgccgcaaggaaggccaacaccatgccgatatgtcccatgcctgtttccattgtccggccacccccaaaaatgctcaaccggtttgaccggcgaacagatagttgggcatcaatgcccgcatttcaaccagttgatccagaaacggaataaccgtctgtggccggcttcgttcccggcgccaggcacacatccattcccgatcgatttccagcatggtttcgcgatggcgcagcaggtactccatcatgcgtggatgacagaaatcgtaggcgaatttccgatcggccgcacgcacggtaaatgcccgcgaaaactcgatggactcgaaatcaatgtcctcgaatcccaacttttgtccgagtttcgaccaaagggtttcgggataaatgcggagttcggggaaggaacgctccaattgaagcataaagacgctcataaagtgctgttccttgtcttcgccgctgccggtcgtataattatattcaaatgacaacaccatccgtccctcgtagatcccttccaggatgttgacggcctggcgatcttcgccctggcgcaatacattcatgaagtcgaattggcgcggcaggcttccgcttctgcggcgataggcgaacccatattggcgggccagaacacggaacgcttcgctccgccggcgttcatacaccaggtaaacgaccacgccaagagccgccgtggcgaaaatcgcccacgggattagggaaaacacattgtgcgagatcagggaaaacacgccatgcgggatcggggagaatggggtgtccatgactcgctttttcctatgatttgcgccgggcggtccggatcaacgattgacgaagacggttcggccgcaatgcctcaatcaagggcatgatttcttggtccgcaattttcatgcaccatacaaaaaagttgcggcacatgcctaattgtcggcgcagcgttgtgttttgtcaaggaacaggacgggccatgaatacccggcaagccgccgggcgtactgttcgaggcagtaggcgaaagtttcgatgcgtagggcgagcgagccgggggaatggttttcgtccatgtcgcggaagacgaagaagggcttgtccgcgcatcggaggatggcttcgagaacggcggacagggacgaatccatgccgcagcgaaaactggatcattcgattccaagcaagcggagatggcttacgatgatttccttgtcgtctgaatcacaccaatacccagcatgattagcaggatgtcgcataagcgagtccagaaatctgccgcatcaaaattagtcatgtccttatttctttggaaacatccaggccgagtttcgccttcaccttcaccctcgccctcgccttcaccctcgccttcgccctcgccttcgccttcgccttcgccctcgccttcgccttcaccctcgccttcaccctcgccttcgccttcgccttcaccttcaccttcgccctcgccttcaccctcaccttcgccctcgccttcgccttcaccctcaccttcgccctcgccttcgccttcgccctcgccttcgccttcaccttcgccttcaccttcgccttcaccttcgccttcaccctcgccttcaccctcgccttcgccttcgccctcgccttcgccttcgccttcaccctcaccctcaccttcgccctcgccctcgccctcgccagttgcgggcttcgggtcggtggcggcgagaaactcctgcgcattggttaggccgtcgccatcgggatcatcgtttccggaataggcatcgagggtctgaaaatgttcgatttcccacgtatccgggaggttgtcgccgtcggtatccgccggatcgtaaattcccaagacgccattcatggtttggggcaacaccgatgcggagccgtccgcattcgccaaggcttggggcgatatcgtttttgcggcggaaagggcaagagccagcgtaccgggagcagttcccggcggcacgttgacgacaatcttcatcagggcgccttcgtttgcggcgaaggtgctgttcttcgaataggcgatgacggtagcttttgtgccggccatgtggtaatcgagagtaaaatcgccgttatcgagcaaagcgccgggctgcagtcccacgatggccgaaccgtctggcaggcggatgctgccgttgagacccgcataagcttcatcgccgtccgccagccgcaagacgacgatcgtctgcccaccgggaatcgtgttggcgttgtctagtgcgaacacggggatggcttgcgcgcccggcgcaagacatgccaggaaaagcagcgttccgaattgggaaaatcccgtgtttcgcatatcgtctctcccttcagtaacggataatgtacgtcacgacagccgacggctggatgttgttgtggggctgatcgccgcctgtcatgctggtagaagcagttctttccatttcttcatcgtcggccacatcgcggtcgttggcgtcatccgaatcattgtcgcgctggtatttgtcctgatacgagtggttgtgacgcggcatctcatcgatggtgagggtgtgcgtctcttcgcctagttgggcgccgacggtgcgttcggtgaggccgctgccttggcccgcgcccataggaacgcgcccccgcaaatcgggcacgttaaaggtgtttgtcccgtcgccactgccccagatggtgccgatggcggcaaagaggtcggaatatttgctgcgttccaccgcgcgtccgtcgcagggcaaatagcccaggggctggtccacgttggcttcgcccgcaaagggcaggacggttcccgcaggcacgcggttgaggaggctcgttgcattgtcggccgtttttgcctgaatcgcgtagggactgcaaagtatctgttgccggggcaacatctcttggggattggccagcggtgtgcctgttttgtccgattcgatggtgatacccaagtagcgcgtgttggaggagaaggccgacgaaatggcaacgacacccacggtgggcgaaacttcgagggcggtgccgccgctgtcgcccagaatcacgttgaacatgccgttgttcaccggcgcctcatagcggcgtccccaaatgacattcccgccggtgttcgcatcgtagatccggaaggatatcgagtagacgccgtcgggaaggggagttccgtctggttgggtgagttcgccctgataattcatcgcatcgggcactgacgccgcccatgccggcgccgcgccggtcgctacaagagccgtcaggataaaggccgctacaagatgtctcatggtagatctcctgtttccacaacgatgctttgccgcaaaaaaccacattttgttgtctctttgctaaaagggcctgtttttggcccgatgattgaaatagatctcgatatcgtcacagtcattgacgcgcaacttggtttgatttccgtcttttgcatagatcaccagacgccagccggtggcggccacgctgcgttcggcgaattcgttgaaggtgttgaggggcgtggtgtcgcgggaggaattgacaagattgagaacgacgtttacggtcagcccttcgttgaagcgccatcccggcggctgcggcggattggccgcgggatttcccggatgcttgtaccaaaatcgcgttgaccatgccgttgattcgcccacataatggttcggttcgccgggaaccggctggcccatctccaaattgcggataaactgcacgccgccttgggtaagggttcctgccacggccgtgaaggcgccggagtgggatccgggaatgttgatcttcatgtaattgatcttgtcgaggaatgcaccggggctcagaagcgtgccgttggcggcgtatcgcggcccaaagaagaaactgagcccattatccagcacggtgctgaaatcgagtacaatgacgccggaggcgtcttggtgttcgagtagataattgcggaacaactgggtggcggtacgaagttttccagtctgttcgtccaagtagtaaagtgtgtttccggcggcgtctttcttccggtaaccgaggatgtcctcggtaaacgacagccagtcttccttggcgactccgccgggaagaccgagttcgaaatcgaaggccttgacggcgttaacgatgtcgatcaactcgtcggcggttcgtgccccaaatacggaattgagcgaatagccgtcgcccatgacgaaaccggcgatattgtgcttgtactcgaaggcgcgcaacgtgaaatacacccatcgctgggccgtttcgaaggccttctgggcctcgagcatgtcgccctgaaaacgcaggcggtgcgtcgggtcggcataatagcgattgaggaggtcctggctgagttccgccatggtggcctcgatcgtggccttttcgccaaacagccccgcaagccgcgccacctcctgattgagcaataggccggcttcctgcgactgtaactggtaggttttcatgtcgagcagccatgttttgatggcggccttgctattgacgtcgagcagggcgtcttcctgcgcgcgaatttcagcctgttccatggcggcgaggacttccttctccgcctcgatttcgcccttgtcttcttcccattggtattggagcgcggcgttcacgctaaaggcaatgagtccgccgcttaccgtggtcgttccctggagatcggctccataggaaatgctttgttggatgcagttcgcggcggcggccagattgtcggcgcgcacctgcagggcctggatatgggcaatctccttggtgagcgaggcctgcttgttgccgtagcggatcatgatggactggatattggcattgatgccggcctcctgggcgcggcgttggacttcgatttcgacctgttgcttgaggttggcgatcttctgctggttctgctgaatgcggttggcggccaactgaatgctggtgacttgcaggttgatctcgctgccttggttttcggccggtttcagataggcgagatggaccggattggcgggatcgggtcccggatccacacccgtaatggcagccagacgctcgcgatatcctttgacttggacggccatgtcggcggatagctggtcttggctgccgcggtaggtctgatagctggcgcgggccttgtcgagtttggccttggccgcgccaaggggcgaagttatgtctccgacattgttccagttgaggagggcgtcgaacgaatccttcgtgttttcgaactgttgtaccagcatcagaaaatcttcgcggaacccgagcagattcaaattgccgtccatgaaggccttcaagccgttcaattcgccgatgctgttctgccagcttgcgatggtttcagggatgcccgaatcggcgggcatttcgtccggatcgtaatcgggaaagatgccgagaaggatctgcccttcgatgtccattttcgacagagtctcgttgatgagggttttggctttctcgatatcgcctggtgtcgcaccgttgcgcggattcccccgcatgatgtagcacatggccagttcgcgcgccgcaaccgcctgatcgcgcagcacattgaacatgatggcccagtccttgtaaccggtgaggagcggcgcggcctcgttcttggagctacagagcacgggaaccggattgtcgttttcgtcgcggaacgtggccgcatacaaagatcgtccgggcacctccgtcacgaagacgagatagccaaacggcggatagtctccgttgcccgtttgcgtccacgggaagaatcggggcatgtctacccccattccgtccgtaaacaattcgtaatagggtgttgctgcatccttataggcctccatggccctctcgaaggcgcggatctccgcatcgataacccgttcgccgggcagcggcacatcaatccgtcgcttgtaggcgcgcaccagtttttctttcgccaccaacagattggccatgcagcggtaataggcgatgtccagcaacacattgcgcagtttcttgtcgaaaggcgcgtatcggagcgcgtcgcgcaccatggtttcggcgctccggacaagggccaactcgtcatcgccaaacatttcggcgagcatctgatcgatttgggtttcggtgaggaggcggttttcgagttggttgacgggagtgtcgttcacgttgccgtagatttcgtcaatgaaccgaaatgcgggaggattggccggatcgtcaatgttgttgagcgaatccttgatgatcaacgtccatacaccccgggcattttcgccgctgaaagcggccagttggccttgcggcttgtgcggccccaaaaacggcggagaaccttctccgatggaaatcgtcgccgaatcacgaagaattaacgacgatcccccttccacacactgcccgaagttatcggcgccgccgcccacattggcaaagagcaggacttcctggccattgggcgatcggagcgagacttcgagatcctcgtcccaggagtgctcgatatcgagcgcgacctgcacgtcggccacgaccacgttgtcctccaccgttaccgacgatgtgatcataccgggattgggaatgtctttgggcgtttcgccaaaggcgggcgtgtacgaatcaattccctgttggaacaggcgaaagacggcgggacttccttccgcgccggcagcatttacgaagatagttgccgagcggggcagccccggattggccggcacgttgaaagtgaacgatccgttgtttgttccattggcgccggacaacgtgaggaattcgccctccgaaatttcggcctgccacgacattgtgccggcgcctgcattggctacgttgaccgtgacggaaccgcccgccgtggccactacactgctctgcgggttgatcgtcaagatattctccgcggcgccctgaacgaccagcaccacggcggggctgccgtccacattatgctcctccgtgtaaacacggatggcctggctgcggacgccgcccgtattggccccaaatttgaccttgaacgacccgctgtccgtgccgttgtcgtcaccgtcgaaacgcagccaagtgcccgaagccgatggaatcaattccgcatcccatttgaattccttcttgtcgagtttcttgacagttacgtcgaatgtggcggtcccggcggtgttgtccacctgccgaaccagcggagatacccagaactcggcatgccacgttttttccaggggcgcgctcttgtcaaggggcccttgggcggaggtaatcgtcaacgaccaatccagaagacggcccacgccccctgtctggtcttggcgaaacagcatggaccgtgcggtgctgatagtatcggacacaaaatgtgtgcgagccaaaaaaggcgcgcagggctggccaaaggaagacgcggcgagcaccaccgtcccgttggtgacaagttcaggcgtgggcaaatagacgctttcgcattcgatgatgccaggattcaacacggcgcccgggttgtcgctccatcgcccgtcgggaccgattgcggcgaaatcctcgtcgttgtccaattcattcggtttgccttcaccccaattcgtataggcgcctgaaccgccgctttcccaaacccatgtcccttcttcatcagcgtcgctaaaaccgatccaagcccgttcaagatggtccaaaagtcctgaaacatccgtgatccagtcattttcctcatcgtcgttcacggaaccaaggcgcctccacaacgttcggcttcggcttgggcgttccagtaactcaggggcgcggtaattttgtaataatggccattggcctcgttgtatacccagccgctttcaggagccgcataggcgccgcggtggccgttgaaaagcagggttcccggtgtttcgcttgtacccgggcaaaggtttgcaaatcgggggcgtacaagtcgtgtgtcattctgggcgccgctatcaacgccggttgccggattagcccccaagatcgcaacaacaagccacagcggcgtcgcgaccttccatgcgcgtttactgctgtatagtccgttcattcctgtttcgctcccgggtccaacttacttggcgtctacaagaggtgcttccggtacgtttacatcacccggcacttttttaagcacaaatccgccttcgatctgtgtggccagatgggcaaatgccctgttttcaggaatcatccgctcgataacagcccccgcgaattcggtcagcgcgtcaataacggtgtccttgtcgggcgcccggtaatggaactcgaaagagcgggtgaatcgggtggccaggcgcgaggtgtaagcgtcgggaacgggaattccctcgatccggagattgaaagcggtatccgtgaccgtaatggtctgtgcgggccagccttggcccggcggatcggattcgggaatgatcccggtgtcgtctccccggaagtatgcttgggcggttccgccggatcgaagaatgaccaaatcgaagccaagtccgcttgaaagttgccgggtgaccacgcctttccacaccgcgtcattatcttcgatgtacacggtgcaatcggatggtgttcccaccacatatccagtgccggccaaaatccggatttcaatggattcggtgttttctacggtcaaatcgtcaagaatccgtatgggaatctccgcctcaaagccgttcacggcggcgctaccggcaagcacggtaaaatcttcccctcccgtggccaaggatgtattgtccacgacgtaattcacggtccccataaaggcgctcgtaaagaggatctttaggattacatcgctttccccttcgtgggtttttaccatcgtggtttcgaaactcgctttgggaatcgcgccttgattacgcaggaaatagacgagatcgcccgcgtcgagacggccatcttcattcatgtccatcgcttcggcatcggattcggaaaggctgttcctgcccaagatagaatcgcgaaggttttcttccgtcacggggcctgttccagcggtactgcccatggcaaatgctaataaggcaatgaacacgatgagaaaacccactcgagatgaaattagcccagcgcatgcacgttccactcgaatccctccctgaggtgcttgggaaacacaccacccttccgcgtttccctgcttattcccgactgcccactccatctttatatctcccctgtcaacggagacagatgtactccccagcacgatgattttacattaaaccaaagagagtaaaatgtcaagaacgagacagggcgggccatgaatgcccggcaagccgccgggcgtactgttcgaggcagtaggcgaatgtttcgatacggagggcgagggagccgggggaatggttttcgtccatgtcgcggaatgtgaagaagggtttgtccgcgcatcggagaatggcttcgagaacggcggacaggggcgcgtccataccgcagcgaaaactggaccattcgactccaatcaggcggggatggcgcgcgatgtatttcgcggcccataatttgcggttgctgtattcggaaaaactgggccgccagacatcgcttatgccgagcgcgtcgggatcgtttccgaataacccgcgcagggcttcgtccccgatgggcagcgattcgatggtgagaatgggatagcccagccggtgaagggcatcccacacgccgtgggagatccccggatccacgtggtacggcctgccgagcatgaccaatgcgatgccccggccgggctcgagcgaatcaatcacggcgcgtccctttgatcgccatgcctcttggaaatcttcccatgcggcgaatgccgcctcggcggcgcgcagcgattcgcggcgggtcatgcccaaatcgtcgcgccaatcctcccacagttgccgcgcggccaggtgcggatcgccgatatccacaaaggtctttctcagttggatgccgcgttccgcgaaaaggtcgcgatcgcgcctgaacgcggcggtggcggcttcgaccgctccggtgcaggcggggcaggcccgggtggcgacgacaccgcgcagccatgtggggaaggtgtccatgatgggaaagaagacgtgggtcaatggggttttctcatggatgcgggcgatcagatcgtgaaggtgcgcgatggccagtttactcggataacacggatcgatacagccgcgtttcgcaccttcgcggtacattttttcgttgctgtaaccggaccagatcaggcggtcttcgggcacgcccagcgcgcggaaatagccgaggaaaaacggagccgcggcatacatattcagtacgcggggcattccgattcgtagtctctcgcgctgttggataacccactgtcccagccgtccggatcgcggtacggcaagggggaggccgggcgatcggaacgtttcgcgcgcggacaacgcggccaaattcaaaccggcgtcactattgtgcgcccggggaggttccgggcggtgtcccgatgcgcctttctcgcagggagcgatgatggcctggcgtttgctcccgttcacgcgcatttcgaggatggtgcggatacacgcattcccgcagccggcgcagcgcgtggagtcgtcgtgcctcgcatcgcactggatcgtttccaacgcatcgaacccgataaaggtcgaagtccgatgttgggcttccatccatcgccgtgtttccatggcgcacccgagggcgccggcttcgccgcaatgttcatgaatgcggatcacgggttcgattcccgattcccgaaactgaccccgaatgaaatccacctgcgccttgacggccgccagattgcgctggacgccgccctgcagcacaaagacacgacccagttggggcaggttgtgccgctggcacacatacagccagatgtttttcggtaggaccgcggcaagccccgcgagaatttcgccgggcgtccagccgtgccgttgcacatccacaattccggattgcagaaacacggcgcatccgtggggaaaatcgggcatgtggcgggccgaaaaagccgcgtcggcatagcgatcgacggaaatgcccagcattgcggcggtggcctgaagatagaagccgttgccggccgaacattgggtgttgaggcggaaatcccgcacggccccccgttgcaggaaaacgatcttgatgtcctgcccgccgatgtcgcaaatcacgtccgcgtcgggatgcgcgcaaagtcccgcgcgcatgtgggcgaccgtttcgacgatggccgtgtcggcctgcatgacatgccgcaggatttcctttgcatagccggttacgcctgcgccgagaatccgcaatcgagcgccggcggtttcgacaccttggcgcaactcgcttgcgacatgccgcaggtcttcgacgggattgccccccgaaagccggtaggccttggcgatgatgctgccttggggagtcatcaggaccgctttcgtgctggtcgaacccgcatcaacgcccagataggcctcgacgtccgcttgcggcaggagaggaggcggactccacgccgggggcgcgtaatcgcgcataaaggcttcccgttcggcatcatcgcggaccagtccagcctgtccttgcggcacgcggcgttcctccatgatccggcggagcggttccgttccgcggtaccggccaatggaaggatgggctgcgatcaaggcttgtccgcaacacacggcgccgattgcgccgaaaaacaacgcatgatccggcacgataatcaaccgtccgtccggctcgccgtccggaacgaaaacaccatggtcgcgccagcgacgcggcagatggtgacgccaacgctcggccagacccggcatgaatacatgcggcccgcccagcaggagaaccgtgggcggcaaggcctcgccgcgggcaagcacggcaaggttttgaagaacgatggaatcgaacagggacgccatgagttcgtccgacggtgttccccgtttttgtagactgatgacgtcggtttccgcaaacacgccacatttgcccgcaacgggatggattcggaccgttgcccaatttacagcctgtaaattgttgatgcacagaccggtttttaccgcgatacgatcaatgatcgctcccgttccgccggcgcatttgtcgttcattgacacggtcttgcgccggccgccgtgcggggtggtgtcgtgaaagacaactattttggcgtcttcgccgcccagttcgatgatcgtgcgcgtctccggatgcaggatctcggcagcccggcatagggcgctggtttccggcacgaaatgggcgccaatcgcttcggcgacggccgtgcctccgcttccggtgacgaagacatggaattcatgccgggggatttccggaaaggccgcttcgatatcgttcagaaaatcatggcataccgacgcttggcgcatttcatggcggcgatacgcggaccatgccacgtcgcggcttttcgccatcatgacgattgccttgacggttgtgctgccgacgtcgaggcctatggttggagacacggtcgtgtccccgtttgttaggcgttgtgccgcacgggacattttattgaatgcccatatagcgcttgataacggcgacggtctccgtgtgaccgttcatttcggcaatttccaaggggatttttcccgacgagttctttacgtaagtgtccgcgccccgggccagcagcaattcggcgatttccgagtagccgttccgtgcggcctcgtgcagcgccgtgaaaccggcctcattgcgaaacgtgatgtcggcattcttttccagaagcaatttgaccatgtcggtaaaaccgagtgtgcatgacagaaacagcggggttttgccgagatagagcgtgttcacgataccggggtgttcgtccaagagacggcgaacttcgtcaatcttgtttccaaacacgttcgacatcagggcattgttcaacgcggcgtgcgtgcgacccgtttcttcctccttggcctgcaggttatccaactggtcaatcgttccccggacgatgccgacattgctcttggcgcccttcgatcgcaggaactcgacgacttccgatcggtttttcgagagggcgcgatccagtggagtcttgccgcggcgatcggatgcgttgatatcggcgccgagcaccagcaagagttcgacgacatccttgtgcccgcagtatgccgcctcgtggagggcggtcatgccctcgaaatttttctcggtcgcggcaatgtccgcgccgtggccaagaagcaattcaacgatgacgcgccgcccctgccgggcggcgatgtgcaacggcgcaagaccctgttcgcgcatgttggccagatcgggacaatcttcaagaaatcgcttgacgccggccacgtccccgctgttgagggcggcgctgaaggcgctttcggtggccggacgcaacaatgcggccacttcatcgttgttcgagtcctgtgcgattttcaagggcgtgcgcccctcgctgttgcgcaggttgacattggcgccccgggacatcagcagtttgaccatgcgcacatgaccctgttccgccgcaatatgcaagggcgtgaatccgttgatgtctgcggcgttgatatcggcgccttcgccgatgaacacctgcacggggccccaatggccgtcccaggccgccgcgtgaatcggagaacgcccgttgcgatctttggcgttgatgtcggcgccgttggccaccagcaacttaaccaattgcacgtctccgcgttgcgcggcgatgtgaagcggcgttcgttgtgaaatgtcggctgcggtgggattggccccgtgtgccagcaggagttcgccgatgccgagacatcccttttccgcggccgaatgcagcggagtccattggttttgatcgatcgcattgggatcggcgcccttgttgaggagaatatccacaagatccgggtgcatggcttgggcggccacatgcagcggaatctggccgatgttgtctttggcatggatggatgcatttcgttcgagcaagacttttaccgcgcggctttgatccttttcgaaagcgctgaaaagcggggtgcgctcgttgccgtcacgggcttcgatgtcggcccccttgtccaacagaagggtcacgagataatcctgacctgcggccgcggctacgtggagtgcggtcgttccgtacttggtttttccttccaagacggcccctttttccaagagatattccaccacggcaatacgatcgggattcggttccggttcgactttttgcacccggctttgattccagatgtggcgcggcttgatccggtcctccatgacggcagtatgcagcgggctttcgccccgcttgtttcgggcattgacgtcggcgccgcgttcaacgagccgggccacggcgtcctttcgggcctcgcgggccgcgacatgcagcgccgtccatcccagtttgtcgccgttttcgaccgtcgcgcccgtgtcgcacaaaagttccaccatgtcggcgagtcccgcttccgcggccacatggaggggggtacggcccttgttgtccgtcgagaagacgaccgccccgttgtcaatcaaaaaggcggccatgtccttttgggcggcctgtaccgccacatggagcggcgtgaatccgtcttttcgcttggcgttgatgtcggcgcccagcgaaagcaacaaggggacaagttcgcggtcgccgtttttcgccttgatatgaaggatactgtcgccggtggcaaaaattcgctggccgatgtcggctccccgttcgacaaacagtttcaccacttcgccgttattgtgcagcgccgcgatgaagagcggggaatttccttccacgtccacctgggcgggatcgacgcccgcgtcgagcaggtattcggcgatttccttatggccgaacatggcggcggtatggagcggggtgcgtttgatggcgttttgttccgtggcggcggacggcttgtttccgacgatttctttcagcgcggcgagatcaccgtaggcggcggcggcttcggcggaaacatccgccccgaattcacgcagcagttttgccgcatcgtattgcttggcctgcatggcgatcatgaccggcagcgacagcttgttttcgtccgcgtcgagatccaatcgagcaccgtagtccagcaacagttcaagcatgggcagattgccggcctccgctgcgcaatgaaccgccgtatatcctcgcggatcccgtccgtccaagtcttccagacgcaaaatatggttttcggcatccgccaaatcgcctgcctttaccgcctcgaccaacgtaggatatttgggaggcggcaaattgtccggaggggtggccggccgtgttttggatggcatgcgtggtggttttgtgagcagggtcggcgtgggaagcgcaagcccttcgtcgccggattccgtaggggcgggcgcttgtggttgaaaaggcgtctgtgccgggttgaagaactccggcagcgtgcccgtcgccggagttgctcccaagggaagaaggcctgttgtggggccctggggacccgagagaggggcggccggcggttgggcagcgccggctgcgcctagcggaatgaagacggagccgtctccaccgcccgggaattgaatatccttgacccagttcatgtttgccggcggggtagacgagccggtcggtggcgttatggatggaaaggccggcgcgggtggcgcaggcgcaaggggaatcggggactccgggagagtggctgggggcgcgctcgtaacgggggccggttccgcttgcgcgggttcgggaagggccggcgatgtttccacgggattttcgggcgcggattccgctggcgtttccgtgattttcggttcagaaaggggcgcaggggcagcttctgtccggatctccgaaaatggttcgggtacagattcgacagccggagcaggcgcgggagtttcggccgccgggggaacccgcgtttccgcaggcgccggtgtgggatgaatgggcggcgattccggcgtttccgtgggcaaaggttcttcgccgacacggacttgcaacacctggatgctggtcaatgcgccgggagcgccgggaatttggatatccttcaaccaatccatcggttgttgcgtggattgctccgtctggtctgtctgcgcgaagaggagggggggtaataggatccccgcacatcccagcgcaagaagcgcagacagccgccgggatttccaaaaggcgcttcgtgccttcatgccaatcatccttgtgcctccgtggcgtcgtgccatatcggtgatttctttggtccgctttgtgcggacaaatggtttcccatcagggtaacgaattgcgcggcccgtccggcgacatgagaggccgaaggccggctccaacttgacaaatcattttggttttcctgtcccacgcaatacagcggacggcgaaaggcggggtttttcctgcaataagcacggatggcttccagcgaagcgccggatccggctaatgcctcctcgaattcccgttcgcagacctgtctggcctcgtcaagcgccgattgcaggcgactgtaggcatgtacggcgccatcgcccgatgtttctatcgaaacgaagtgaaccgaacggccctgccgggcgcagtaggccgcgacggccggttgcacgccgtcggattgggtcgagggaaggcatccgaaaggttttacacttatgaccagatgggctttccggtacaaggcgcaatagagggtcttgccgatttccatgtggccctcgcctccgacaatgtgcgtgttgaaaaagggccttgccagtttacgcagcattgcctgcggaatttgaggatgcgggacgcctcgcagcgctcggcgcatccgttcgtagtcgcggttcaacagccatgccgtcagacgcaaaacggccacgcctttccagtcggccgcgcgcgaccgtgccgcggtgtccctggtctgcttggtcgtgccgccgcgtccatggcgaaaacgttgcgccgcgacgtcaatcaggtaattgacccatgtcatgaccggttcggcggccacttccgcgccttcggattcgagaaactcgaacaggcggtaattgccgtcgccttcggtaagttgcgcccaaaactcgccggtgactttgcaaaggggcttcgggcgcgtgaaatccacttcgatttcgcgatcaatcaattccgcgcagcgtgcgagcgcacttacaagcgtgtcgtcgaacaaccggtgcgcaatacatcgcgccgaatcgcgatccagccccgggattcggcgacacagcgcgcctcctatcagcgccgtcagccagcgcccgcgtgttggcgcggccatggtctgcctgcgaagcgcatcgcatacgatttccatcactttcccaaacgtgcgttccgtttgtccggggacgatttcatacggacggatgcgcatggcaaggtcgttgagcagatcccccaccatgaggcatgtgatgaagcgttcagcgaaccgggcgttgagcggaatcgcgtcctcctcgccggactgtttcaggccgcctttctcttggaacaaaatgacccggaatccttcgaatccgctgttgcgcagtgcaagcccgaattcctcctcgtacatgccaaaccggcacgggccgcacgatcccgccgtgacgaatacataggcatcgttgatttcgcgcggcgtaagaccggtttcgtcccgcaaccggcgcaagcggtttaccagtgcgccaatggtgaaataggccgggttgcacatgcccgggttgcccagttcgcgcccggttcgataatccgcattcgtcggcgtgggcagggcttccgatcggtagccgagcggcgcgaacgccgcgcccagcaacacgccgtgccgctccgtcaacccgccgtacaagacggtgacgcgatcccgttccgcgcgcgtgaaaggacggcattcgctccttcggtaatgtgcagcatgtgtttgatttgcttgcccttccatcatgcgggaatgatgccatattgccccgtttcggaacaatgacgccatatccccttgtcttcttttcctggcctcattgctgtccaaaagaattgtaaaaaaccacaaaaccgcaaggagccacgttttacctttttattccgttcatcggttcgatatctgcgactatctgcgtcatctgcggaaaatcacatgatccacagatggcgcagatatacgcagatggaaaacagggcacggatgttcgggccaggcgattccgaactcaaatctgcatgtcagagcggcccaaaatacgattgatcgggaacacttcttcttcatcgcgaagaaaaggtgtcccacgaacgctttcccggaaaaaacgttgtctatttactcaaaatggctttctgcaagccgacatttggacagagatgtcctggccgaaaaaagcacgcctaatccggaaaaatcttttattgccgccggacgggccttttcaagtatgatgagggtgtgcgcggcatgcgcgaatgattcggccacaaacggagggagagttcgatatgaacaagacaccggtatcacgcagggattttttggcggcgtcaagcctggcgctgggcgcgggagcgatgtggcacggttcggccatgggcgccaacgaccgtatcaacatcggcatgatcggtacgggcgaacgcgccgggtcgcacatcggcgatctgggcaaattgcaggaatcgcacaatgtgcgcatcacggcggtttgcgacgtgtggcggctcaaccgggaagccgcggcggcgagggtcaagaaattgtttggcaagaagcccttcgagacgtcgcgctttggcgaagtgctcgcgcggagcgacgtggatgcggtggtcatctcgacgccggattttgggcatacgccgattatgatcgaggcgttgaaggccggcaaggatgtatacgttgaaaagcccatgtcgctgacgatcgaggaagcgaatgaagcgttggatctcgcgcggaaaaacgaccgggtcgtccaggcgggcacgcagcgccgcagcgagggctgctggaaggccgcgcgcgcctttatcgcgtcgggcaaactcggccaagtcacgcgaatctcagcggcgaacaatgtgaacgagccgcgctgggcgcgcaagttcgacgattgcaaggaagaagatgtggattgggacgcctatttgttcaaccggcccaaggtcccgttcgatccgcgcctgttgcgccgctggcacttgtacaagatgtgcacaaacgggatttcaggtctttggatgagccatctcgtggatgccgccgcaatccttatgaatgcgtcctatccgaacagcgccgtcgcgctgggcggtctctacatgtggaaagacggccgggagcatacggatgtcttccatgctttgctcgattatccggaaggattcttgttcgattggtgcatgggcctgacgaattcagcggggaatcattacaccgttcacggtcgtaacggcacgctggagccggagaaactggcttattccggagacggcggggccggtgatcaaaaactcggggagggcaaactcgaccccgtgccgaatgaagaccatgtggccaactgggttgactgcatgcgctcgcgaaaacggcccaatgcggacattgaatttggccatcagcatgccgccgcgacgatcatggccgccaacgcgctcgagaccggccaacggatgcggtatgaccgcgaaaagcgaacgatttatcccggttgacaaaccggacaagccgtaacgggaacgggcaggattcggaatcgggaggcggcatggaaacgcaggcagcggtgcggtttcttcaggaacgcgtggcgcttttcgatggctttgacgccgggcgcttgggcgcgcttgtcgaaaattcacgttttgtttcctttgaagagaacgaatcaatcatcgaattcggcgaggaaggacgcttccttggcattctattcgacggcgaggccgaaatatcggtcatgaacgatgcgggcgaccgtcgcacgctggccctgctcgagccgggtaatctgttcggcgagatatcgctcatgaccgggggcaaaaccattgccgatgtcattggcaagacccgttgccgggcactgctcgtcccgcaggaggcgttcgcgcggcttatcgccgtcagtccgtccgccattcaatacttgtcgcggcttattattgatcgtacccgcgcatcggcctacgaggagcagaagtcgcagctgaatgctgccgcgttgcgccgcagcgaagatccctatggcctgcgtcttgccacggacaagccgatgaaactccttgtggtcaactgcggtagttcgtcgcttaaatacaatctgttcgacacaacggacgaggcgggcaatgcacatggcgtcatcgagcgcattggccaggaaggcacgcggcatcgccgtcattccgcgcggggcgacgacgagacggcgttgcgggccgccggtcacggggaagcctttgcagccatgatcgaagcgctcaccgcgccggatacgggcgtgctcaagtcgctcgacgaagtgtcggcggtgggccatcgcgtcgttcacggcggcggacggtacagccatcaggaaatcatcacggacgaggttctcgccgaaatcgagaaggcgtccgcgctcgcgccgctgcacaatcccgtcaacctgatcggcattcgcgaagcgatgcgccttttcccaaatatcccgcatgtggcggttttcgacaccgccttccatctcaccatgccgccctatgccttcctgtacggccttccctacgagtatttcgagacgaagggcattcgccgttacggttttcatggcgcctcgcacaaatacgtcgccatgaaggccgccgaatttctcaagcggccgttcaatgaactcgaaaccatcgtgtgccacctcggaaacggcgcatcggtgtgcgcggtggatcacgggcgatcggtggacacttcgatgggcatgacgcccgccgagggattgatcatgggcacccgttgcggcgacattgatcccgccgtcctgattcacctcatgaaaaccgagggccttgacgcggccggtcttgaaagcctgattacccgggaaggcggtctcaagggcctttcgggcatctcgaatgacatgcgcgagatcgaagcggccgccgatcagggcgatcaccgcgccctgctcgctctcagaaccttcagttatcgcgtgcgcaaatatatcggtgcgtacgcggcggccatgggcggacttgacgcgcttgtcttcacgggcggcatcggacaaggcagcgttggtgtgcgaagccttgcctgccaacatcttgccggtatgggcatccgcattgacgagcggaaaaaccgggaagccgacggattcacgcgtgtctgcgacatcggcgcagacgattcacgtgtccggattctggtcattccaaccgatgaagaacgcatgatcgcacgggaaaccctgcgcgccatcgaacgccggtacgttaccgaaatcatccgggcccagaggcccatgccggtccccatcgaggtttcggcccaccacgtacatctcgccggggaacatgtcgaggcgctgttcggccaaggccgcacccttacgccgaaaagcgatctatcgcagcccggacaattcgcgtgcgaggaacgtgtggatctcgtgggacccaagggccgcgtggcgggcgtgcgtgtgctgggtcctgtccgttccgaaacccaagtcgaaatcgccctgaccgagcaattcaaactcggcattgacgcgcccattcgcgaatccggggatttgcgcggaagcccgggtgtgaaactggagggtcccaacggatccgttgaactggagcagggcgtcatctgtgcgctacggcacatccacatgacccccgaagacgccttacgcatgggattacgcgacaaggacgtggtctgcgtgcgcgtggagggcaaacgtgaactcgtctttggcgatgtgctcgtccgcgttagcccgaattaccgccttgcgatgcacatagacaccgacgaggccaacgcggcccacatcggcgccggtgcgacggggttcgtggacgccatccagagcaggcgatgacgcagtggcgggcgcgtgttttacggccttgaaccccaagacgacatggcctatcataagcgtgtaaaccggtggcatgggatccaaaaaagccgggcgcgtgcgcccgatgctggggagtagccgatcgatgagtcagaaaattcgtatcgaattatccatcatgatgttcatccagttcttcatctggggcgcgtgggccgtcacgatgggaacctacctcggcaagatcggctttacgggcgcggacattggcaaggcgtacagcacgacggcgtgggcggccgtgttgtctccgtttttcattgggatggtcgccgaccgttttttcccggcgcaaatcgtgctgggcgtgatgcacctgcttggcgcggggttgatgttctgggcctccaccgtcacgacgcccggcctgttcttttgggtgctgctcggctatgcgttgtgctacatgccgacgctggcattggtcaatgcgatttcattccatcagatgaccgatcccgccaaggaatttccctcggttcgcgtgcttggcacacttggctggattgccgtggggtgggtgatcagcctgatgaaggtcgaagacacggcactgccgctgcaaatcgcggcgggcgcttccttgctgatgggcctgtattccttcgcgttgccccatacgccgccgaagtccgccggaaagaaaatttccgtcagccagattctgggtttgccggcgctcaaactgatgaaggagccgtcctttgcggtgttcgtcgtcagttcgttgcttatctgcattccgcttgctttttattatagtttctgcaatccgttcctgaacgaaaagggcatgccgtatccggcgctcaaccagtcgctgggccaggtgtccgaggtcctcttcatgatcgtcatgccattcttctttgtccggctgggcgtcaagaaaatgttgctgatcggcatgctggcatgggcggtccgttacgcgtgttttgcctatggcgcggcgacgatgccgttgatgggcctttattacatcggcatcattctgcacggcatctgctacgacttcttctttgtgaccggccaactttatgtggacaagaaagcgccggaggaaatccgcgcgaacgcgcagggtttcattgcgctggtaacgtatggcgcgggcatgattatcggatcgaatctttcaggcatgattgtggacaagtttacgacgttggatgcggccggaacgctggtggcgcgcaattggcagtccatttggctgattccgggcggcatggcgctggtcatcgtggtgttgtttgccctgctcttccatgagcggaacggcgccaaggcggagaaggcgtaaagctgagttggcgagagcaaaggacgaaaaggacacaaaggacacaaagggctttcgttgtcggtgaggagtccttttggtccctttcgtccctttcgtccttgggcgtccggccttgaaggcgcccgttccagcgagaacggcagggaaggaatggtcttatgaaagcggcaatcaaccaatgggcatttccgaatgacatgcccgcgcaggaagcgctggatcgtgtgaagcgcgcggggttcgatgcgttcgagatctgcggcgggcccggcgggccggtcaaactcgatgcgaccgaggccgaaatggccgcgattcggcgacatgcggattcgattggcattgggttgaccagcgtcgcgtcgggcgtcggctgggactattcgctgtcgtcgcccgatccggcgatgcgggaaaagggcaaggaagcgattgcccggctgcttcaaatcgcgaaatggctgggtgtggataccctcctgacggtgccgggcgcagtaacgccggacatatcgtatgacgcggcaatcgaaaacgcgctcgatgccatccaaggtctcgtacccgtggcggagcgcctcggcgtgtgcatcgccatcgaaaacgtttggaacaagttcttgttgagtcccgtcgagatgcgcgatttcatagaccaattccagagcccacaggtcggcgcgtatttcgacacgggaaacatcgtggcatacggctatccggagcagtggatacgcattttgggcgatcggattcggatggttcacgcgaaagactttcgggcctcgaccggcaacatggacggctttgtgatgttgcttgaaggaaacgtgaattggccggctgtgatggcggcgtttcgcgaaatcggttacgacaaggcgctcgtcgcggaatacggcccatactcgcattcgctcgacgcgatgctcgcgcatgtacgcacaagccttgggacgattatcgaactttgaaacagccgtgacccgaagggcataaaggccaaaaggacctgaaggattaggaagacactgcagggtgggtgacgcgaagcggaacccaccaaatgattggggagtcgtgagaaatgaatgtggcgatagtcggatgcaacggaatgggccgtcatcacgcacggatggcggcgaattgcgggttgcgcatcgtggtgtgcgcggacgtccagaagcccattgcacgggcgctggcggatgcccatggggcggattcgatgaccgattgcctcgcggcggtggagcggcgcgacgtggacattgtcgccgtcacgaccccaaccccgacgcatacgttttacgtcgcggccgccgcgagggccggcaagcacattttctgcgaaaaaccgttcgggcgcacggtcgaacaatgccgggaggccatggccgccgtgcaaaaggccggcgtcaaactgttcgtcgggcatgtggtgcggtatttccaggaattcgaggcgatgcgcgcacaagtcgaggccggtaaggtcggcaagcccggtttcgtgaaattgtaccggggcggaatctttccgacgggcgtaaacggctggtttcgcgattattcccagagcggcggcgtcgcgttcgacagcatgattcatgacctcgattggctgcgctacgttttcggcgagccggaacgtatcttctgccaggccatccagcgcagcacgccggaacatcttgactatgccatggcgaccgttcgcatgaagagcgggctgatcgcgaaagtcatcggaacatgggcccatccatccggtttccgtgtcgaggcggaaatatgcggcgacaagggcatgattcagttcaatagcgacgaggcgccgttgtttgtggcgcgacgcaacacgggagggggcgggccgggcatgatcgtgccggccagcccggtgccggtcagtccctacgaactcgagtggcgtgattttctgtcatggattgaaggcaagtccgccgcgcgcgtgacgccggaagacggactcgcggccgtccggatggccgccgccgcgctcaagtcagtcgaatccggcaaaccggtcaatctctagggaggatgccgtcatggccaaagtcggaattatgagtttcgcccacatgcacgcctatagttacgcggcgtgtctaaatgaacttcccgaagcggcgctcgtagccgtctgggacgatgacacgaagcgcgggcgcgccgccgcccgccagtttggcgcggcgtttgtcgcaaacatggacgcgtttctcgcgtcggacattgatgcggtgattgtgacgtccgagaacgtgcggcatcgcgaaatggtcgaaaaggccgccgccgcgggcaaatggattttgagcgaaaagccgctttcgccggacgtttcggattgccgcgcgatgatcgccgcgtgcaagaaggcgaaagtgggtcttggtacggcgttcccctgccggtattcgccgccgctcatggaagtgaagcgaatggtatcctcgggagactacggcgccatctatgcggtgtcctgcacgaacaacggacaatttcccggcggctggtttgcgaggcaggccatggccggcgggggtgcgacgatggatcacacagtgcacgttgccgatgccctgcgctggattaccggaaaggagttcacgaaggtctattgcgaaaacggtaatctgctgcgcgaaggcattgacaccgacgacatcggcagccttcacatggagatggaaggcggaattcaagtttcgcatatcgcgtcatggaatcgctcgaaaagttttccgacatggggtgacgtgacgcttgaaattgtcgccgaaaaaggtatcatccgcgtggacgcgttcaatcagaagatcaacgtctataatgacgaggccgtgcgggcggaatgggcctactggggcggcaatcccgatttgggacttgtacgcgacttcgtcgtggcctgtgacgaacgccgcgaacccgctgtcacgggtctcgatggcctgcgcgcggtcgaagtgaccgtcgcggcctacaagagcgcggcatccaatcgcgtggccgccgtgtgaggcggacaggagcacaggagatcggatgatgaaacatatacaacgggttacgattccgcggatggctgtcgaatacaaggccgaggtctacaaacaggactcgtttttcgcgccgtttgtcgcggccggcaaactggtggcgcttgtcgcgggggcggtcttcggcctttcgtcgctgctttccggattccgaaccgaattgtaacgcccttgcccgaatataaaggaaatggccggaagaaatcggatcttccggcccatttctcagcgacctcttgcgccattgagatcacaaaaaatgatggcagcccgctgggcgcggggcattgccggcgtcaggccaaggcggattttcccgaggatgccttgtcgcggtgatcgctttcatacaccagcagcgggtcttcgtgattgagtatcactccgggcgtgatgacgcattcgcgcacgtcgttgcgcgagggcacgtcgaacatgacgtcgagcatgatttcttccagaatggatcgcaatccgcgggcgccggtgttcttggcaatggcgacatccgcgatggcctcgatggtctcatccggaaaacgaagtttgaccttttcgagttcgagcagtttttcgtactgcttgacaagggcgtttttgggttcgaccagaatgcggatcaggtcgtttcgattgagttcgtgcaaggttgccaccaccggcagacgtccgatgaattcggggatcagaccgtatttgatgagatcttccggttcgacctgctcgagcagttcgccgatgttgcgctcgtttttcggacgaatatcggcgttgaaaccgattacgttggtgcgggtccgccgttcgatcaccttgtccagtccgttgaacgcgcccccgcagataaaaaggatgttttgggtgttgaccgagatgcattcctgctgcgggtgcttgcggccgccctgcgggggaacgttggcgacggtgccttcgaggattttgagcagcgcctgttgcaccccttcaccggaaacatcgcgtgtaatcgagggactgtcgctcttgcgggcgattttgtctatctcgtcaatgtagacgatgccggtctcggcgcgggtcggatcgaattccgacgcctgcaagagtttgagaatgacattttcgacgtcgtcgcccacatagccggcctcggtcagcgtggtcgcgtccacgatcgcgaacggcacatcgagcatccgggccagactctccgccaacaacgtcttgccgcagcccgaggggccgatcaacatgagattcgacttctgaatctcgaccccgccgatgacgccccccgccgcaatgcgcttgtaatgattgtgcacggccaccgaaagaatgcgttttgcgtgttcctgaccgatcacatactgatcgagaaacgacttaatctcaccgggcgtcggcacctttaccgaacgcttgaccttgcgctggttgcgttcctcggccacaatctccgagcagagattgacgcattcgtcgcagatgtttacatcgggacccgcgatgagcttattgacttcgtcgtggcgcttgccacaaaaagaacatgcgggaatctcgttgcgccgatttggaggcattcgattctccttctaccaatggaactatcggtcatggtatagcacttttcggcgtttttgtcaagagttttctttccgccgattaccgtaaccgcctatattgtgccagccgacggggttgcccgtcaagaaagattcgggcatccacaatctgcacgctacgggaagtcggcatccttgccgaccggtatttacgcaaagcccctctgattttgccggtcaacccgaagtggcgcgcgaggacatgcgccactcccaaccatcaagagcctcgcgatcatgtctcttctactgaaacgcggccggtacggcatgaaacgcacacagacgcatcttacgtgcggaccgcggacaatcccgctttccatgaaatgggatccccgccgtgggcgagaagttgcatcaatttgacacgtccagttcgttccgcaaatactgctgcctcaatcaggcaaccggcaaggaggaatggcgccatgacggatttcacgaatggcaatggacgcgtacccacgcttcatgtggtgggtgattcaattccgcaggcctattttcgggccatgaaagccgtttgggaaaacggtttggccatccggacggaatacgaccgcaaggacaattccggttcgtatattgatccgccgagccgcgatgcccgcgttttgattgaagtgaaggatccgtttgcgcaaccgcgttttcctccgatttcgttttgcgaaattggcgtatatatcgccgaaatcatgggactcaaggattaccgggtcgttccgttcgacaagcttcgcgaggcggttcatggggaattgtcggcgcaggaatggccgtacacctatcatcagcgacttttcgcgcatccctgctcggatggttcgacgcttgatcagatggccttggcgatcgaacgcgttgtaaagacccctcattcccgccgggcggttgcctcgaccgccgtgccgacagtggacccgtttttacgggaggatatcccatgccttcgcgaggtccaattgcgttgcccggaagacgcggacggacgtcttgtattgaatatgaacacgatgtggcgatcccgcgatctctacaaggcatggggggacaacgtcattgcgattactttcctgcagcagacgattgcgcggacaatcgcggcggcttccgggcgggaggttcgcgtgggcagttatgcggactacagcggcgcgcttcacatctacggtcaggatttcggcgcggtcgggggcgacgcggagcgcggcctgcacagtttcttcgagactttcgacgaggaggcattcatcgcgcgatcgctgaccagcgagatggcccgcgacatgcttgtgctaccgcaacttcaaaacctgctgacggatcgtcagcgggaacaatggggatttcctcctgaatccattgcgctgctcgaatcgctgattcgcgacatcgaaaacggcgattgcatggtgtagcggcaggcaattgaaacagtggatggttccagacggggttgttgcgttcaagggcggttgatatcgcgattcagacgtcgtttgggtggcttttcgcgaaaacgatgtagcggctggcgaaaaaattgaagatgagaccggccaggatgcccataatcgaagcgatctgcggaatgagggcgggccagagcgacaacgcgccgagcgttacgccgtaattgaccacggcgccgaccgagctggccgcgataaagccgaacatttgccgccaaaacggcccgcggccggcataggaaaacgtgaagcggcggttgagcaggaaattcgtgatcatcgaaacaaggatggccacggccacggccgccttgaggggaaccccggcccataactctacggtgagcacggccaggttgacgaccgtgccggaaagaccgaccagcccgaattgaacgaaatgcgaccagttgccataacggtaggtatagagccgccggacgtgttcgagatagcgcaattgttccttgaacgaaagtttgctttcaccgtgggcgcgcttgctgaaatggatgggcacctcgcaaacgtttttgcatccgcacttgatcaacagttccagggcgattttgtatccgacgggattcagggcgtccgcccgatcgaaggtctcgcggcgtatcgcgaaaaatccgctcatcgggtcccgcacggaggtcagcggcagggcgaaccatgtcgccacccggctgtttatccagcgaaacaggccccattggtcgtccgtcgaaccgccggggacgtaacgcgaaccgagcgcgaaatcatggccggcatcgagcgccgcgatcatttccggaatcttttcgggcgggtggctcaggtccgcatccatcacaagcagcgtgtcgccgcgcgcttcgcggaatccgtcgagcaccgccggactgagtccacgattcgccgtccgaacgacaacccggacccagggtttgttcagcgcggcgacggcctcgacgatgccgtcacggctgtcgtcgtccatgaaaacgacttccaaatcaagcgcgcaggtctcgcgaacgcgttcgatacgcgcgatcaattccggcacgttggccgcttcatgatacgtcggcacgatgacggagagagtcatggatatcccttggcaggctgtggtttgaagactctaggcggatcgacatggaggaagcggatagggcggcgcgcatcatctcttgcctttcagccgtatcattcacccttcatccttctcgtcttagcggtcgcgcccggattcggccctgagcctttcgacaaacggtgttgaaacggaaccgcccgcggcttcgatacggtgcagttcatgccatgccgcattgtaatcctttgtatcgaataacgccaccatgaaggggcgccatgcgccaagaaaaacaggatccgccgcaaaggccttttcgagacgggcgcggcactccgtaattttgttctcgatgagatccacaatggcaaggcataggtgggaaagcgcatattggggatccaatcgcgcgcattcctcgaacgtttttctcgcttcgtcgttccggcccgaaccgagttgtccgagacctgaaagaaacagatccattgccttccgggtcggggcgggatcgcccttttccgcaagcacctgggcgagccgcccataacgtatgcccagatccggattcaactcgccggcacgccgaagcggcgcgaccgccgtatcgaaatcatgggcatcggccaacgccatgccccattctgaataggcgatcgcatagccgggatcatggcgcgtggccttctcgaaagattccgcggcggcgcgcaactggttgttctggcgatagccataaccgtccagcaaggcccggatcgccgcggcgggtccggatatctcgttgcccgattcgatggcgcgcaagagatttccatagatgtcgcgggtaggcgatccggccgatccgatgcccggaatgcggtggagggcctgtcgcgccgtgtcgcgatcgccgtgttcggccagcgccacggcaagattgccatatccttccatgaaatccttcggatcgggcgggcttttgccgtccacgaccggcttgccggtggccgtgatcgcgtaggccaggacatgttcgataccctgaaattcctttaccctgtaccgcagatttcgcgcggccaacagcgcgtcgagttgtttgtgtggtcccgaatcgaaatagtccaacacgaccaccatccagaccgtccgctcgcaaggacgcgacgcgtcgccgcaaccgtaactattcagcaaaaaagccgcctgatccacaagcgtttcgatggtttcggcggaagataccggattggcgcagcctcccatgttgaacagcaacacgtccttccagatggaaacttgcaccaaaatcggttcgccgggcttggcctcgtgtttgagaaatcggcccgccgacagccagtcggtgcgctgaggtcctggaaaaagcattgcggtctggcaggccatcagggccgcacacgcaatcgttcccgttgtgcgcatccaattccggggcagcgccgctatcgcgcctccgatcagcacgtaaagccccagcgaactatagaccgtgtaccggggaaaaatgcacggacgccatgcaaggcttgccgcatacaggatgaccggcggaagcagcaggaacaggataaacaacagtgttgtccggtcgcgcggtatgcgccttgcgccccaggccagcgccgcgcccgcgatcgcaagccatgccagatcgaacaacggatggagccgcgcccatgcgcgcatttgcgcggaggggcgcatttggtaagtcagatggatcgcatcgtccgcaaaaacatcacccaggaattcaagaaatccgggcgtcttttgccaggaagccgtctgttcgggcgaccagaattggatccctgcgacgtatagcaggagcggcgccaccatgatcgcatgcaagccgcaccatacgaacaggcggttgatcggctgccggtgggcgagcaggagataaacgccttcggcaaacggcgccagtaatccgaaggtatggctccacatcagcaggatgttcaggagcacatgcgccgcccaccaaggccactgtcccccgcgcaaaattcgaagcagggtgtagagcgaagcggaggccagcaacgccaccagtccgtacatgtggatttcctgtgaaaaatgccgatgaatcggagacaatgccacgagggccgccgccaacagccccgcaaccgggccaaaggccagcgatccaatcgcgtacatgaccgcaatcgtcgcaatgccgaaagccaccgatgccaggcgcagtccgatcggcaaaggacttatgaatcggccccaaaggtattcgaaggcgtcgtaaacgggcatggtcgccgggtcgagtgtatggttgatgcgcagaaatgcgggcaggcttggcgcgtcgagatacttcaggctcgtgtattcgtcccaccacaccgattccgcgcgaatgccgtacaggcgcaatgccagcccgcccagcagaataatcgccaggatcaggcctgtgtatcttcgggacgtttgttccatgtcgccaagatccgtgtttgccggacagtataggatattcgggggcggacaacgaattcggcgggccggggatgcctcgactcgaatgcgacattcagtcccctttcgtgctcgcgctcgtgcccgtaatcgtgctcgtaatcgtcatcctaacgcggctcagccgcaaggcctcaatcaaggatatgatttctttgtccgcaacttctgtgtcccatgcacagaagttgcggacaaagaaactaaggctcttccggttttggcgatcttcagccccccttcgataataggcgccctctgtagtagggtcattgtggcaacaccatgagattcgacacggcaggcatcctcgtcgggaatgggcagcttctgtagcggggatggattcatcgcaagacgccgcgagtattccatttccccggaggggaaaaacacgaatagccgcgggtgataacccgcgggacgggatcgtggaagatgaccctgaaagggtcgaacgtgaaagggtcctccggtacctaattgttcaacccgttccgggttgaccgctggatgatccggttccgtgggttgacacccacggctattcacgtttcggcccctgccggggccgggggccaccgtcaatcgggggcgttgaaggaataggggacgtctcacgtcatgaggccggtccggacacgcccgttcaaccggatcagaaaagatcggaaaaagcggatgagccgaaactaatcgaagatcgcggatccaagtttttgttcccaacaatcaaggaccgatgacggacagacatcggctacccgtttgatcttgtctcgttcgaatcagtgggatgcgagcagcgcacgagcaagacgaggcgcacatacggaccaaataggttttgagatttccggcacaacaccggacgcaatccccctgatccctatacgtgatacgtggcgtgttgatgcagtgcggcattcaaggtattatgaattgcggaagataaccatggattctaaaatcaaaatcgtgatccttgtatgtgtactcgttcttgcggcggtgattgacgaaacggggcatgcggaagaaggcgacgccggaaaagcgccgatggcgctttggacgttcgaggagccggtggaagcgcttcagttccatggcgcaccggataagacggtttggacggccaagaccgatcaggcgatcgtgcgccgcggaggcgtgcggggctatgcgctggatttgcgaggcaatcacgcaatccgggccggcgctttcgatcggtcccggatgtccgctctttccatcatggcatgggttcgcccgttggaccttacgggtttccgcgaaattttccggcaggagagcgacgaccgtgtgctgttttcgtttcaagatagcggaaacatcctgtcgctgggcttgaatgtaaacggttatgtggaatgcgacgcacgcatcgttccaaaacagatcctcgacggcacatggcatcactgcgccggaaccttcgacggccacaccatgcgcgtctttctcgacgggaaggaaatcggcgtcctcgaacggccgggattgatcgcgttgtcgcccggtttgccggcgttcattggttcaatgggcggaacaaacgagcattttcagggcggcctggacgagttgcgcctctatgacgtcgcgctgggcgcggaagaaatcatggggcttttccgtcaagggctggcgtccatttcggaaaattccaaacggctggacattgccgccgggaaactctacgtggaggcgccgtccttttccgaaaccgtggccaacacgcgcaagaacctccgtatgcgcggtcccgcggccgatccggacttgacggatgcgcttggggcgagattgcgcgccgcatttccggacgaatgcgccgcctttttcgagtggaccggcacaaccgccggcgcgcttctgtcccaggacgaatcgtcgaacgaagcgcaggcacggcggcttatcgaactcatgctcgaatataaaccgctgacggaatatcagaagcaaaagcagtcgccggaagatcgcgcgaaatgggacgaggcggagcgtatccgcgatcggtttgaacggttgtcggcacagggcgagtcggctcaaagttccccggaatggttcgatctgatgttcgacgccgggcgtcgaatcgcatttcgtccccgcgtgtacgagcccgtcgcaccctatgtaaaacccgaaacgcccgaaacgcgaaacttgaccgaagacgaggcccgggtcgcaatcgaaagcgactggatgcaccaggccgatcaaaatccgacaccggaacgcattcgcgatgaaatccgttgggcgcgtgaaatggctgcgcatatccaagtggacgtttccgaaccattggcccgattggacatgctggcgaaaaagattccggggaaaaccgccacggaactttgcgatttatatctggccgtgcggatggcaaaacgcgaaatcatgttcaagaatcccgtgatcgatttttcgcggctgctgctggtggacatgccctatccgcagggatccgaatggcagcacgagacgcgccatcgtctcggttacatggccgtgcccggcgcgcggctgatcatcctcgatggactccatccggcgggaaatgtcacgcaactgatgccccaaccgccgttgcatggatcactctggcggcccgacgtgtcttttgacggcaaaaaagtcctgttctgtttcaaaccgcacaatgaaaagtcgtttcacatttatgaaatcaactgcgacggatccggcctcgtgcagttgaccgatggggtctacgatgacgtggatccgatctatctgccggacggccatatcatgtttgcgacgacgcgcggacataattacgtccggtgcatgccacccaccaattcgttccaacttgcacgggccgatgcggacggtgggaacatttatctggtttcgtacagcaacgaacccgactacctgccgtccgtaatggacgatgggcgtgtcgtctatacccgttgggagtacacggacaagcccctgtggcgcgcgcagaaattgtggaccacccatcccgacggcacgcaggtggccacgttctggggcaatcagagcgtctggccggatgtcatgaaagacgcgcgcaatattccgggcagtcgccgcgtgatgttcaccggcagcgcccatcacgattggtttgcggggtccgtgggcattatcgatcccgacaagggcctcaattttcccaacggattgaccaaggtcaccgccgatgtcgagtggcccgagtgctacaacggccccgtcgatcccgtcgagtcgccaagttaccacgtctcaggcaagtatccggcatactactcgccctacccgctgagcgagcgtgattttcttgtatcggcgcaacgcgacggaaagttccggctctatctgatggatgtggacggcaaccgcgaattgatctatgagggtgtccacaacatttttcatgcgatgccgctcaagccgcgcgcgaaaccgcatgagatcgtggaccgcgtggcgtggccgtcccgcggggagcgcgataatcccgcgccgggcgtgctgttcagcaacgatgtctacaaaaatgcgccggaagaactgcgcggtaaggcgcggtatctccgcatctggcagatagacgccaaaacgtacacctactggcacaagcgtccgtacatctcgaccggccccgtggtgtccgccgtgcagtccgaaggcgtgaaacgcctcatcggcaccgtgcccgtcgaaagcgacggatccgtctcatttacggctccgtcggggcaggctttgcactttcaattgctggacgggcattttcgggccttgcagacgatgcgcagtttcgtcggcgtgatgcccggcgagagccgggggtgtctgggttgccatgaatcgcacagccgcgcaccgggactcggtgaaaaatccatcgcgggcagcgcgccgccgcgcgcgattgaaccgccgccgtggccggacaccaccgtcagttatgcgcgttatgtccggcccgtgctggaccggtactgctcccgctgccacgagggggacggcgaaggccgcaagacctttgatatgaccgaacggcccagtccgccggtgttttccgaaccgtacatgacgttgatcgggcgtccgacgtggggtgcgccgtatacgccgccggaaaagcccgtgccgggcttcggcatcgccggggtgctcatggtcgaagcgttcgatcagcgcgatccgaaggcctatgtgacgccgaaacccatgacgagcctttcgtacaggagtccgttgattgaaatggtgtccagcgggaaacaccatggcgtcgttgtggatgagacgagtcggcaacggctcatcgcgtgggtggatgccatgtgcccctatctcggcgacgaggaagtacgggccatccccgatccggaattccagggcgtggactggctggccatccggccccggatcgcaacggcgcccgttgtcgtgcgtcccggtccggtggatgaagacgccaaaccgcccgcatgaccgtcggcatgatgaaaaccccgtgagaagacaacgattgacgattacgataagccggcacgataaaggaggctgcccgtgagtttgattattggatgtctggtatgtggaatcggcggcgcgacgacgccgctcgtggtggtgtcgttcaacttgcgttacggcacggcgctcgatggcgaaaacgcatggccgaaacgccgggaattgatggtcgaaacgatccggacaatgaatccggacatcatgggaacgcaggaatgccttgagtttcaggcgcaatacctcgccgaggccatgccggaatatgcctggatcggcgtggggcgcgagacggacggcaagggtgagatgagcgcgctgttctaccggaaagacgcgttgacggctgaggaatcgggccattactggctttccgaaacgcccgaagtgcacggttcccgttcgtggaacacgagttgcacgcgcatggtcacatgggcgcggtttcgccatgccgggacaggggcggctttccatgtgctcaatacgcatttcgatcacagaagcgaagaggcccgcgtccaatcggcccggctgattgtccagcgcttgttatcgctgccgcgggaaatgcctgtcattctcacgggcgatttcaacgccaacgccgaaacatccgccgcatggaaaatcctcgttgagggcggattcaaggatgcgtgtctcctggccggggaacgtctcggtcccgacgtgacgtttggcggattcaaagcgccgcccgacgtaaaacagcagcgcatagactggattcttgtccgaaatgccggcagtgtgcagcggtatgaaaccgtcacgttcaacaaggatgggcgctatccttcggaccattatcccgtttccgcggtcatactcattccggggacgccgtgaaaccgccacagacagaagatttcctgccgcgcggattgaccgaagcggaagcccggcggcgtcttctccaggaaggccccaacgaactctccgcctcgaaaccccgcggactggcgacgatcgcgttcgaggtgatccgcgaaccgatgtttctgttgctggtcgcatgcggcgcgatctatctggcgttgggcgatatccgggaagcgatgatgctgttggggttcgtgttcgttatcatgggcattacgttctaccaggaacgcaagacggaacgagccttggaggccttgcgcgatttatccagtcctcgcgcgctggtcgttcgcgacggcgttgaaaagcgcatcgccgggcgtgacgtggtaaggggcgacatactcgtgttgtccgagggcgatcgcgtgcccgccgacgccgtcgtgctttcttgcagttacatgtcggtggacgaatccctgctgacgggcgaatccgtgccggttcgcaaagcgccctggcacgaggccgcgaaacgggaatccgccgggacggaccggccgggcggcgacgatcaggctcttgtttattccggaaccttggtcgtgcagggcaaggggcttgccgaagtttgcgcaatcggcatgcagacggaactgggccggattggcaaggcgctgcaatcggtaacggtcgaaaagacccgcctgtccgtcgaagtctcacaattggttcggaatgtggccattcttgccgtttcgttttgtgtggccgtggtgttgatttatggattgacccggcaagattggcttcaagggtttctcgccggcatcacgctggccatggcgttgatgccggaggaatttccggtcgtattgaccatcttcctcgcgctgggcgcgtggcggatttccaaaaacaacgtgctgacgcggcgcgtgccggcggttgaaaccctcggtgcggcgacggcgctctgcgtggacaagaccggcacgttgacacagaattgcatgacggtgcggcgaatcctggctaacggccgcgactatacggtggattatgcctccaaggagccgctgccggaagcctttcacgaaattgtcgaatacagtattttggcgtcccagatcgatccgtttgatccgatggaaaaggctttcaagcaattgggggaacggtacctgcacgataccgagcatttgcacgtgaattgggtgctcgagcaggaatatcccctttcgcgggaactgctggccatgtcgcatgtctggcgcgcgccggacagcgacgaattcgccaccgccgcgaagggcgcgccggaagccatcgctgatttatgtcatttcgacgaagggcaacaggccgccatgacggcggatgtaaaaatactggcgcgcgacggtctgcgcgtgctgggcgtggccaaggcccatttccggcgaaagaccatgccgggcgagcagcacgatttcgagttcgaatatctcggcctgattggctttgaggatcccgttcggcccgccgtgcccaatgcggtcagggaatgccatgcggcgggaattcgcgtgatcatgatcacgggggattatccggaaaccgccctgtgcatcgcgcggcagattgggcttcattccgccgacgaatgcatcaccggcgcggaattggacaacatggacgatgcggccctgcgggaacgcatacggacggcccatattttcgcgcgggttgtgccggaacagaaactgcgactggtcaatgcgctcaaggccaacggcgaaatcgtcgctatgacgggcgacggcgtcaatgacgccccggccctcaaatcggcggacatcggcatcgccatgggcgggcgcggcacggacgtcgcccgcgaagcggcgggactggtcctgctcgacgacgacttttcatccatcgtgcaggcggtgcggctgggccgccgaatcttcgacaatttgcgcaaggcgatggtctacatcctggcggtacacgtgcctattgcgggactttcgctcattcctgttctcttcaaatggccgctcgtgctgtatcccgtccatatcgtctttctcgaactgatcattgacccggcgtgttccatcgccttcgaggcggaaccggaagaggagggcgtcatgcggcgtccgccgcgcaatccatccgcgctgttgttcgggcgcgccagcgtcgtgttgggcctcatgcagggaatcagtgtgcttgtcatcgtgctggcggtcttcgccgccgcccgctatcgcggccacagcgccgaggatgcgcgaaccctgacgtttgcgacgctcatcgtcggcaatttgggcctgattctgaccaatcggtcatggtcccgcacttttttctccatgttttcggtgcgcaacaacgccctgtggggcgtaatcatcggagcgccgctgtttctgggattggtgttgtatgtgccgtttctccgcgaactgtttcactttacgccgctgcaccttgtggacatcgttttcgcgcttgcggccggcgccgccagtattttatggtttgaaggcatgaaggttctccggcattcggcatgaacaaaacaggccaggcagtggtttcatgagcaagcgccgcaaattcaaaatcggacagcgttccccggacgagatcaaacggcttcgccggcgtttgctcagcggcacgctcgccgaaattcaccaaatccgcgacgaatggcacggtgtccattaccggtggtggatcattacgctgtccggcgtgctggccttgttcgtgctctcgtatttctcctacacccaactgggctggtacgcggaccagcgcccgctgccgacgggcagcgactggcttctccggcgcattccggcggtcaatgtgctgcccatcctgtcgtggggctggtttgctctgcacctctatgcggcgggcgcggccatcgccttccatccgcgccggatcccgttcctgctgttcatgctcagcgtgttcctgttcatccgcacggcgttcgtgtttctttcccccattggcccgccggtcgaaatgattgacatgggcaaactcgattatctgttctcgcgcctgatgggaacctataccttcaaaaatgaattcatcttttccggccacacctgcatcccattccttttcttcctttttttcgacacaaaaggcctcaaactgctcatgctctgcggctcgatcaccatggcgatatgcgtccttctctcgcacaaccattacaccgtggacgtgatcgccgcctaccttatcgggtattccatctacgtgctgtcggaaaatctgttctacggattcatccgtcccctgttccaagtcttcccttcccaggcgagatattgatgatgaacgtttccgcatggctcgaacggctggaccatccgcctattgaattcaaacgaaccctgcgcgcggtctatgggtcggacgaatccgtcgtcgcggcgcgcctgcgcttgctgcggcgggttttgggacgattccgggaacgcttcggcgacgggcccgtacgcgtatttcgcgcgccgggacgcatcaatttgcgcggcatgcacgtggacacccacggcggctacctcaacctgatgacccaccagcgtgaagtgctggcggccgttcagtcgcgggccgacgcggattccgttttcgtcaacaccgatccgcacttcgaggaaaccgtcattcggaccggtgatgcgcgggccggcgagtcgttccgacgatcttggacggagtacatcctctcccccggcgtccgaagggaggtcgaggcgcgccgcggccattggtcgcattatctggccggcgcatggctcggtatccagcatcgtttcccggatgtgctgctatgcggcatgaatgccgcgatcgggagcgatttgccgcggggcgcttccttgagttcgtccgcggccctttgcgtggcggtatgcagcgccgtgcttgcgctgaacgggaaggaactggccccgctcgaattgatcctcgcggcgcgcgacgcggaatggtacacgggatcccgttgtggcctgagcgaccaggccgcgattatcctcggtgggcaaggcgaactagtcaatttggccctgttcgcgccggatctgaacctggcgagtctccggcgcatggcatttccggaaacgctgcgcatcctggttgtcaactcgtacacggaacgcagcctgagcggcgcggcgctcgtggcctatacgcgcaatcgcttcgcctattcgttggcgatggaaatcctccgtcaggagatgcggcgacagggattccccgaacctttcgtcgccgaaacggaccgcttgtcgcgcgtgacccaagaacgcatcccagaccttccgcgcatcctatgcgccatgccggacgccctttcgctggccgatttgcgcgcgcgctatgccttgccgggactcgacgaagcctaccggcaatacttcggaaccgttcccgaggatcaaagaccggacatgatacacttgcgcgggccgctccttttcggcatcgcggaatccgaacgggcgcggcgctttgcggacgcgctgacggacggcgactggggcggcgccggacgactgatgtccatcgggcacgatggcgaccggctcctcgatgcatccggacggccgtaccggttcgacgtatccgacgggacgctggccgaaatggccgcccaacacacgcccatcgaaatggcgcccggcgcctacggcgcgagcgcgcccgtgctcgacggtatcgtggacgccgcgatcgccgcgggcgcattgggatcatcgctcacgggcgccggcatggccgggaccgttctggcgctctgccgagccgaagacgaatcgcgggtcgtgcaggccgtccgcgattggctgggatcggacgaatatgtaaaacgagccgggaaggaacttggaaaagaccaactggacgacgcggttcacgtcaacgccgcgcctgccgccgccgccgaactgcatggcgaatagcgagcgattcggcggcaggctctaaagatctacggcttatccagtgggcgatagggatgttatggacgaaaaaggcccaggaagcggttggttcccttcgcattcttcatccccggcgaaagcggctctttcgacaacaccacgatggccgtcgcgagcacgaggagggcgatgggtgatgcggcgggaacgctgttgggtggaagaacgttcagaatgtagggccgggtgtattggatgcttttcgcaccgtcatcgaaccggcattcgtagacgccggcgtcttcgggaacgaccgggctcagggtgatcgtgcgggttgtcgctcccgtaacgcggggcggggcatccacgatatccgcgccgtccttcttccattggtaattcgatccgtccggcgccgtcaacgagacgaccatgccttcctcaatccaaccgttggggtggggcgtgatggcggttgtgcgggtccgcgcgcggagattgtcttcgcgatgcgtgtcgagcaatgcctgtagttcggcggcctgttcggggtatagcgaagcgaggttgttcgtttcgccgggatcgttttccacgttataaagcgctcttgcgccggtcgagaggttgtgaatcaatttcatcgaaccccgccggacggtttcgaggttgacccaccgcggcgcggcgccgccccgcgtgtaggcaaagacggggccgtctggatcgcgcgttccgaacagatctttcccttgccacgcgggccgcggcggcaatccggccaaggcggccagtgtgggcagcaggtcaacagtcgtcacgacggaagggacggttgcaggggccaaccccggcccattgacgatcagcggcacgcgaaagaccggctcgtagacggtaaggccatggcccaagtggccatgctcgaacatgtgttctccgtggtccgccgtgaccacgaagatcgtgtccggatgcgtttgcgcaatggacaggatcagccgcatgacttccgtgtccgtgaaccggcagtcgccgtcgaaaagggtccacacggcgtccttccccgtggcggacaattcggcataggtacgtgcgggtatcaggcccagcgtgtaatcaatctgatcgaacaggtaaccgtaaaaattctccgcgatggtctgttccgccgggagcagccccgggttgggatagccgaaaagcgcgcggtagacctccggcggccagaagggcagatgcgggtccatgtaatggatatacaggaaaaacggctgcccggcggtttcaatgcgcgcgatggcgttgttcgtcaactcatcggcgggcaggatgggcgccgaatcatcgtcatagatgtcgaagccctgggcaaacccattgtcaaaggtcaagtgattattgctctgaatgccaattgtcgcatatccggctttgttgaaaaaggtggccatcgtttcgatggcgcttggcagcgtggatgtgcctgtatagacctgatgcgcatccacgtgcagcgacgtaaacaccgaagccatagccggacgcgtccatgtgcaggccgtggttgcgttggtgaaccgcaccgaatgcgacgaccaatcgagcagggcgggcatgacgccctgcccaccgcgttccgcgtcaagccggtcggccctcaacgcatcgagcacaatcagaacgatattgggcggggggaaggccgtcgccgcggtgtccatggccaagaacagcgccgctgaaagcagaaaatatttgatcttgctggtcaaaaagttgcttcaagctcgaccggtggcacaccatctttgtcccatccgcgcttttcgtaatacagcgagagcattttctcgaactcgtgttcatcgagtgttttccccgcgttggggccggtcagcacgggggctttggtcactttgaacgggagcgaatcggccttgcgggtcgcacccagccggatgtttatgcgccgcgtgaggttgtagacccgatcggacagttcgagcagttcttcgagcgtcatcgtcttgcccgtgacataggtgtaaaacttctcgtagtggcgttcgttgaggccgagttcgatccaaggcaagcggcagacgccgagcatgtcgaacagcggccgaacggcttggtggtacatgacaaggtccaccttttgctcggcggaccacgacgcgccctcctcgatttccttggcgatggtccatgcgcgggcgtggtgcgcgccgatgtccgacgtggcgtaggccagccccatggacgtgccgacccggctgtcgtaggctgactgttcgagcccttttacctggagcaggatcttttccatttcgggccactgtttgatgatgcgccgcgatccgtccgcaaggatatcgcccacgccctcccgatgggcgatgcggtgcatcaggtcgaggatggcgtcgtcgtcgttccatgcgatgcccttgccgtcgagatccgccagcgagatgacgcccttttcgtagccttcgatgacggcgccgatgatgctgcccgtcgagatggtgtccatgccgagttcgtcgcacaatttgttggccgccaagacggcgtcgaaccgctcgacgccgaggttcgatccgagcatggcgcaggattcgtattcggggccttccgtgacggtgccggcgtatttgccgttctttacgagacagatgttgctgcagcacatcgggcacatgaagcaggcgctgtcgccgatcttgtaatgttcgagcatggtttcgccgttgatcttgtcgtgggcggcgaaggtggtcgccttgaagttgtacgtcggcaggatgcccttcgagttcgcgtattcgatgacgttcatcaggccctgctgctgccacagccggaaatacttgtgatccgtcatgtatttgacggccttttgcgtttcctccacaagtccgttcatgtcatggaccggcagatccttcgtgccgcgcacgacgatggccttgaggtttttcgatcccatgatcgcgccgatgcctgtacggcccgcgttgcggctccaatcggaattgacgcaggcgaatcggacgcggttctcgcccgcgaccccaatgacggcgatatgaaggttgtgcgagccgagcttctccttgatgatgccctccgcttcgaggcaggttttgcccttgagcgcgggcatgcggatgatgctggtgtgttcgtcgtcaatgaacaggatcgaaagttccggcgccgcgccggcaagggcgagataatcgtggccggtctggcgcagttcgacgccaaacccgccgccaatggacgaatcgccgtaaaggcctgttgccggagaaattgcgacaaatgaatttttaccggacgacggcacgtagcaaccggtcaacggcccggccgccacaaccagcagattctccggaccaagcgggtcaatgtggaaatcatgcgccttgaggttgtcccagacgagtttcgcgccgaatccgcgcccgccgacatagcgctcgatgaaatccccggaaagatcgcggcgttcgatgacgcccgtggtcagattgacgtgcaatcccttgaaaaaatagccgcccttgagattcataactgctcctttccaatttcggcgtattgaagcgtcttcgtctcgcccttttcgacgaattcaatttccttcatctgggtgtagcccaggacgttgttgaggcgcttgctttcgccgagggcgtattcgggcacgagccgaatcgcgtttttggggcaatgcttgacacattcgggatcgtcgtcgcatagatcgcacttgatcggatattcgcattcgtcgtgcgcgtacatcgcgccgaacgggcacgattcgacgcaatgaaaacacgagatgcagacgcccgtatcgaggctcaccacgccgtccctgcggctgatcgcgtccaccgggcacacttcctcacacggcggctttttgcactggctgcacacaatcggcatccgaaccaccggatgtgggtaggtgatgagcacgcgaatcgcgctcttcttggggttgttgacgccgaaatgcttgatcgcgcacaccagttcgcacatcttgcacccggaacattccgcgggaataaccgccagctttcgcgacatcctctgcctccgagtagcccgacttcacaaggcaggagccggaatattccgagttccacgcactgcgaacgactacgacttccgcgattccggcgtgcggcatccacaagccacgcgccgtccatcgcaaacccccggtatactaaggcccgagcagcaaggaatcaagtggaaagcagcgccgctgtgtatcggcaagcggccccaccgttatttcagtctgtaaggcgttatgcgacccagtagttccccgatttcgtcgcggatattgaggagttccgaagcgtcctgcgtatgcgcgttcggggccttggcgatttcgtttcggacacgttcgagcagggccttggcggtttggcggtcggcacggggcatgcctttgggcggtttcttggcgaaggcttgcagcatatggaggtattcgaagtcctccatgccgttgcggatgtcttcccagcgcatgcttgaacagatcttgtcgcgtccggggtacacgatgaacggatcgccggccggcaggggttggcgatcggcaacgtagatgctgccgccggtcgcgtccatccacggcgacacgtccaccgccgccgggacgggatcccacgtcttccaatgcgcgtatccccagtgcaggaatcctttgaggtcgagcgaccacgaaagccaaaacaggatgcggttgcggatgagcggataatcgaggaatcggttgggatactcgccctgtggatacaggcagacgtaactccacgtggcctctttgggattctctttgcggccgggtttgatgtgctggatttgcgggacgcggatgtcaatgaagccgtcaagcccttcgtgcatgatcgcgtccacgatgggtacgccgggcagccacccgcgcaccttgcccgcgcgttccgtccatgatttctcgttgacggggatcggttcgtccgcgatgtgctgaatgtatcggcccgcccaacccttttcctttaggtgcgcccagacgcccttcagaaaggcctccatatacggctcgaattcggcctcggacaacgtgccggtgtcaagcggtttgccgtccgatccaacgatgttgaagcgcgaccagacaaattgactttcccacccgccgcagcgccccgcgacgtggccgccctcgatccacgtgacgcccgccttcttgaacatttcgacccaccggtcgagcgccgtgaaatcgaacgcaaacgcgccgtccgcctgttgcgtcatgcagacgagcatcgtgaagggcgtgaggatcgtatcctgccggtggcggcccatgtcctgcgcgacgcgatcgatccacgtccagcaggcgtcggaaaagagcggaatccggtagtattcggcgagattggcggggaagaaccactccgtttgatgcagcgtcggttcgtcgggcagcgtgaatgcccaaacgtgaatggcaacgggcacgtcaatgtgctgcccgtcgaggtctatgcccagcgtgccggtgtagtcgccgggcggcgtgtctttcgggaccgtcacggacacccacagcggctgcgtccattcgtcgcggatgcgcacgaccggttgttcgagaaatccgtcgggaaagaatcccggtgcggcgcgcaggaaggttttcggatccttgttcgcgggcgggttgttatggacgtaggtataccatatccaatgcgcgccgagatttgacttggcgatgattgcgccgtccggcccttgtagatccggcagcgagaacgacgccttcgcgactgtcagacccttcggggtgcgcagcagaacctgcgcgtcttcggtatcgtttcgcgctgctttcaacgcaatcgcttgcggcgcgtttgccggcttcacggaatccggaaacgccttgtccagtgaatgtgtcgtccaccagtcaatgttttccgcgcgcgcggcggcggaacctatcaggaccgcgcacaccgtgcaaccccataaaaacgtccccatcgcatccatgatcgcatcctcttccgttgaaactttttagtgcgtccaattcgctcgccatcataatcgaaggggcctgtacccttcgaatagatatcgaaggcgtgccggaagcggtttgaaaacgctttcggggggctgatacgataatcggcgatggggatggagttccccgtaatcgccatgtggctgataactcctgtcgaaaaaagagaaggcgataggaggttgcagcatgagagatacgaccgcgagcgtcgaactcctggggcaaatctgcgcgcagtttcatcttcagaatttgacgccgcagctcaatgcatgttccgagaccctccgaagcggcgggagggtggaagtcgccgtgctcgggcaattcaaggcggggaaaagttccttcctcaacacgatcatcggaagcgaaatcatgcccgtgaatgtcctgccggccaccgcggtaattacgcggattgggtacggccctacggatcgggccgtggtccatcggttatccggcgaaatcgaggaaattccgttggccgaactgcccgaatatgttaccgaacaacgcaatccgaggaacgaaaaacgcgtggccttggttgaggtggaactggcgtcgctggcgccgtaccgcggtatatgcttcgtggacacgccgggccttgggagcatcttcgcccacaacacgcaggcgtccatggactggttgccgaaggtgggcggggcaattgtggccatcagtgcgaaccagcccttgggcgaacaggatctgcgactgttgggtgaggtgttcaagcataccccggaggtggtgatccttcttacgaaagccgatctggtttccgatcgcgaacggaaagccgtcatcgaatttacgcaatggcagattgcccagaataccggggggcgtcaactcctcgtccttccgttctcgaaccggccggattttgaacggtttcaaaacgatgtacgcgaatacctcctcacgaacgtggcggggcgccatgaggagttgttcgtgaaaatcatgggacacaaactctccgccctgatctcggaatgccgggcctatctgatcctggcgcagacggcggcccagtccgcggaagcagcccggtccgagttgcgcgacatgattcggcgtgaacgggagggcttggattcgttgggaaaggagattcacgtattgacccgggatttgaaaacgcgcgtacgcacggcggccggcgagcgattccacgatcttcacggcgaattgaccaagcggctttgcgcatcgctgaaaaaagcgatgggcgcatggacgggcagccttgcgaaaaggacccaggcgtttcaggattgggccgcaagggccttcgaggaggaattgggccgcgtttcggagcatggaaaaggatatctcgaagaatacctaatcgaggcgcaagtcagttttcatcgcaccgtgcgggcttttcaagaccggttgtcgaaggaaatcgagcgggcgctgggcatctcgttcgaaagcgcgcggtttcacgccgaaatcgcggcgcccaggaagcctgacgtgaaaatgggccaagtcttcgacagccatatcgatctcctctggttcgccattcccatgggcctttttcaccggcttttcgagcgtcatttccttcggcttatcccttgggaggtggagaagaatctttcgcggctggccagccaatgggcggacgccgtaaacgcctcgatagatagtctcgcccggcagtccatggaatccatacaaaacgaactggcgaccatcgaagggctggtttcgggtgtgggcgatcagtgtagcgccatcgaaacggcccttcgccggctcgacgaatgttccgaatgcttggcgattccaaacggaagaggagacgcggccgcccatttcggaaactgttagttccggaggccggcggtcccgctaccagtaccgggaatgcggaaagatggcgaagcaaccgatcgaaacaagcccgaaccacaagcgggttatcgctatcacgcttagaatggttgacgagtttctgtgcgaatgcgaactatgggcacggggccgcgaactgcactcggttctctatcgggaggaaaattcgctcacatcggaacagcgtgagcagattttccataaagtggaatcccttcgctctgttttgatggaaatgcaacagacactcggactgaagaccatgataaaagaacccgcgcgcatcattcgtgcggcctgttttgccctttgggaatccctgatcgaactgcaggggaagtatatccgcgcgtatggcgaaccctctggggaactggtggcatatctcgatccgaagagcgaagagattatcaccctgctccaagacattttgaagatagtcgaatctgacaagccttccacgaagagttcagcatagatgcatgggctgttgtcatggctaacaagaagaaacttcgcgcgctggacagcgccgaaaaggaacgccgccgggaaaatgcgcttcggcccaatccctatcttgggtacaaccacaatgcattggccttgtatcttttggaacgcgaagcgtacgccattgccgaggctgaactgaggcgggcggtctggctcaatccccatgaaccggtgttcatggccaacttggcgtggtgccttttcaaacaggggcgtgatgaagaggcgtggaaatgtctgcgacaggctgtcggaaaaaatagccataacccgcggatagaccaaatcgctgcttggatgggactgtccggcggccgtatcaaggagggcagcgatgcgccacaagaatgaaaaacacacggcctacttcgatgtgctggatgcgctcgtgaagacggcggagtgcgccctgtgcgcgctcgaatccgtgtccctgaagcgctacttcgacgggctgctttacgagatggtgaacgatccgaaggtccggagcgaacttgcccactccaagggatattgccaccgacatgctcatatgttgctcgaccaatccggcgcatttggaacggccctcctttaccaggatcagattgaggcgtttagaaaatgcctggaaggtttttctgtggcaaggtcgaggtacgtcgccggaaggggggaacgttcctggagcacccatgccgggtgtccggcgtgccgcattcaggacgaatcgcgaaaacggaacctatccgttctttgcaagtggatcgcggatcccgacatgcgcgccgctttccaaaaaagcgccggtttttgcgtgccccatttcttcgttgcggtcgaatttttaaaaagaccggaggattgcgagttcgttgttcaggtccaccgcgaaaaatatgctgatcttgcacgggagttggcggaattcgaacgaaagcacaactaccaattttccggagagatcatgggcaaagaatgcgattcgtggcagcgcgcggtgaagatgattgtgggatcgcgaggcctgttttagattgccgtgaatttgctcttacggcccggcgtggcatacaatagaatacatggggatggagttccccataattgccaagtggctgatgactcctatcgtgtcgaaggatgcggtaggagtttcgtgtaaggaaacccccgcccaaagggatggtccctatccttccaatcgcgtcagttcatacgaggaactgatgaatggaggttttttatggaatcggcatttgcggtagcggcgttatggatggggctggcggtcgccgccacttcgctttcgaatcatttgcggatatcggtcgcgttgattgaaatctgcatcgggatcgcggcgggattcgtggccgatcggtatttcggcgcaggcagccttggcggcgacctgccctggcttcgttttctggcgggcacgggcgcggtgctcctcacgtttctggctggggcggagcttgaacccgccgtgcttcgtaaaaaatggaaagaggtgtcgatcgtcggcctgattgggttcgtggcgccgttcgttggctgcgcagccgtggcgcactttgtcctgggatgggatgttcgggcgagcgggctcgcgggagtcgccttgtccacgacctccatggcggttgtatacgcggtcatgctcgaaacgggcttcaatcaaaccgatttcggcaagggtattctcggcgcgggctgcttggaagtgccttgccgttcggacaggtttaccgagacaatcgaaccgttgcgcgtgtctggacaggacattgtttccgctttctccgggaactcgcatcatcagaacctcctcgatgatacccgatgccgggtggcagccgccaatcggacgcgcgctacggtttcttctcttctttcttgtcgtccttcttcttgtcgaccacgccgtcgggacagcgaatctcgatagtctcaaggcacttgacactacgcccgacccatttgtcgccgggcaggatcagacggaatttgccttcaaggggcggcagaggttccgcgttcttgtcgatggcgatcatgacgcgcttgccttcggtcgtcatggtgagctccgtccaggaagccagcgtctgatagccgtccgttccgcggaacaggacgtacatgttttcgcggcgatactcgctcgcggcttcggcggctttggccttcttgaacagttcgctcaagcggacacccgaatagtcgaagatgccgatgaaccccgaagagtgtcctacgcaaatcaactcctcttcgatgtcgacgggcattttacgcagatccgccacggacagagggatcttcgtgccgtccaagtcgacgattgtcagcgtttccgaggagcgcgcagggccttcagcccacgctcccgccgcacttatcacacttgccgccaatatacacacactccatttcagacaagacatcatactcgctcctgtttgttgttgtcagcacggcttgctgtgaaaaccaaggggactcaagggacaacggtcacggtggcgggatcggtcggttcggtagggccgcccttgccgagcttgtcggccagattgcttgtacaggggtaggtgttcgggtccggtgtggtcgagttgggatcgtgagcgatatagcgaatccattcggcatgggcatcgagatagaggcagttcatgccgcccgggacgtggttgaactggttccccgtcccgcttggattctgacataccatgtcccagatgaccgggatcgtgctttgcgccatggcggtagccgcgggattgttgatgtccgtgacgaagaaacgttcgacgccttcacgcaaacgataaaggcgcgtcgtttcctgtgtttgcgtgtcgatatactcgatatcggtggtcacgaagttttccggcaagactttcttgctatcgcgggcatccttcgatgcgttcttctggatgccccaatcgtcgtcggaacgtgtcgcccacccaatgtacatgtatgaataatcgcggaactgctgcggcagttccttgaagcgaaggtctctcagttggtcgatgatgcccttgattcgccccgcctggggatcggacggacagaagatgatgttgtagtccgacatgtattccggatagacggcaggcccccaaaagaatgtatgcatgggtacggggtccgcgccgtcggcggggtagtagcccggatactggggcggaaaattctgggcgccggcctcgtttgcatacatcttgaataccaggccgagctgtttcaggttattctggcacgaagaacgccgtgctgcttcgcgcgcgcgcgccagtgccggcagcaggatggccgccagtatgccgatgattgcaataacgacgagcagttctatgagcgtaaagccattccttcgcgtcaacattatgcagtccctccctgtgtttatggatcgttgtgttggatgcgagcctattcgatatgcaccgcgaaacataacgatagcataccacgtcttttttcgaatgtaaagtttccgtaattactcctgcccgattggatctttccgcttctcgataagggcgatttccccgataatcatccgtttgtccacggccttgcacatgtcgtacacggtcaacagcgcgacgcttacggccgtcaaggcttccatctcgacgccggtcttgtccgtcgcgacggcttcgctctcgacggcgactccgtccgattcgagcatggcatggacacggacactgccgatattgaccgtgtggcaaagcggaatcaggtcgcaggtgcgtttcgcggcctggatgccggcgatctcggcgatggcgagcacatcgcctttcttgatgtggttctctcggacgagggttattgtctccggcaataaatgaatgcggccgtgtgccctcgcaacacggcgctgcacgggtttcccgctcacatccaccatccgcgcgcggccttcgttatcgagatgggacaactttttcaccttcatcctcctatgctgttaaaatggccacggctcgtctggccgcacaagggtttctccgccacggcgcgcagaatggcctcgcgcgcgcccagttcgcggacgccgaattggatgtcgttgaagaggcacgggcggatcatgccgtcgcatgacaaccgcaggcgattgcagcgcgcgcaatccccgccgcttccgccgatcacgaccgagaaatccccaatttcgagattcatccgccggatatagcgcacctccagcccctcctgccgggcataggccgcgacaccgcgcgcatcgggttcgtcgggtgagtcctgaacgacgcaattgagcttgatgggggccagcccggcctcgcgggccgcgcggatgccttcgagaacacggtgtacgtcgccgccgcgcgtaatggccgcgtaacgggccggatcgaccgtgtcgagactgacgttcacgcggtgaagaccagcttcgacaagtgggcgcgcgaattcggccaggcgcgtgccgttgctagtcatggcgaagtccgcgatgccttccatgcggctcagcatttcaatcaacgcgacgatgccgcgccggacgagcggttcgccgcccgtcacgcggaccttggtgatgcccagttccacggcggtccgggccacttcggcgatctcctcgaagcgaagcatgcattcgtgtccgatgggagggacgccctcgggcggcatgcagtaggtgcaacgcaagttgcatttgtccgttacggagatccggagatagtcgatcttcctattgaatcggtcgaacacggaccaacgttccttcctgcatgacggttgttccaatgggcaacacgatcaatccatcggcatcgcacaaggcattgatatgggccgagccgtgatatgcgccggcttcgacgcgtccatccggcgtgagcttgacgggcagccatgtttcgcggtccgttcctttcgtcttgatgggcgatgccagcggcaacatcgaatgaaacgggtgaaaatcataccccataatcttgtagagaaaaggcttcacaaggatctcgaactggatgaatgtcgagacgggattgccgggcagtccgaagcaatagatgtccggagagacgccaaaggtggtcggtttgcccggttttattgcgatggaatcgaaaaggatttcgacgccgttttccgtcatgatgtccggcacgagatcgaagtccccttttgacacgccgccggagagcaggattacatcgttttccgctatggcccgtttgagcgcactatcaatcgcgggttttgtgtcgcgcgcaatcccgtagtacgttggaagcgtgtccgcggtaagcgcctgcgcgtacagttgatggctgttgctcgtgcgaatctgcgaaggtccggggtactcggtgggctcgaccagttcgtcgccggtggcaatgatccctacgcgcgccttgcggtaaacgcgcgggtacgtacaacccacggtggcgaggaccgccacatgttgtgcggcgatccgcgatccgtgcagcagcaccgcatcaccctcgcggatgtcttcgctctttcgacagatgttgtctcgtgtcgacgcgccattgaagcggacaacgttctcgcgcacctgttcggtgtactcgatcataatgacacaatccgcgccctcagggagcatcgcaccggttgtctggaccgatagcacgacaggcgggtctgcatcgtaggtgcgaatgagcggcgcggaagccgagttgggcgatcccagcgaattgaaggcgacgcccgccggaatcgagacggctatcacaacggttccgcccgacggaatcaggtcgaaggaataggccgcgtccatgccggtgaaatggtccaccgaggcattgtccacgacaatatccgtggcgtcgaaatccatgacggattcgctgaaggtggccgttaccggaataggggctgcattcgttggattgggcgctatcgtggccagaacaaccgtcgggctgggcgattcaaaggtgatgccgagggatcccggcgtattgggattgccggctgtatccgtggcggcgcctgcttccaccgtcgccgtaaccggtccattcgacatgggatacagattgaacgagtagctgtcgcccgcgccgacaaagtcgccgacaatggcattggacactcccacatccgaagcgtcgaatccaaggacggattcgctgaacagcgccgtcaccggaatgggtgtcgtgccggtggggtctgaggcagtcgtttgcagcagcacggtgggcggcgtattgtctatcgttacggtatcgcttggacccgcattcggagcctcgttcccatcggcatccaacgccgttcctgccgcgatggaaatacctaatgcgccatcgccggagatccccgaaatcgttactatccgctggactgctccgctcccggaaatgccgatggttcccgatgcggtgccttcgatattcagaactacatcgtctggaatcaggctgatgctcgtcgcatccgtatagataagaacaaactccaccggcccgatatttgttatgggaatcgaaggtccgacgatggatatgcgggggcccacatattcgtaggcgcccatgtcgaactcggaaccttgaggacgcacgacccccgcgaggtccgtcaggggggcgtttgcggcggtccccgcgtcaatgcacggcgatacagcccggagcctgaaatctcccgctgcgggattccgcaaggcgggatccgcatcgagattgccttggccgggccatccgccttggatatccgaatagtctgccgtggcgatcccgccgttgtccacggcgatttccccgttgccgtcgttccacaggatgcagtttactatcgcgcccgttgaaccggtgcgggtaaagatgccgccgcacgtgtccgccgtattgccatacacggtgcaattggtgaaagactgaatgccgcctccttcattgtaggccgccccgcctgccgttccggagatgttgcccgaaaaaaggcagttcacaagcgagggagcgcagtttcccccgttgtaaatgccgccgccttttactgaagaggcattggcggtgaaccggcatgccgaaaaagattgtgtccccgcactgttgtaggcccctccgccggcattttgggcggtgttggcctgccaagtgcaattggctgccaccaaaatccctccggtggtataaatgcctccgccgtccatgccggcggtgttggactcgaacgtggttgaagtgatggtggggcctgcgccgttgttgtacacaccgccgcccgacccggtcgcgttgttgaaccccaaataacaggaaatcaaccgggggccgcctccctcattataaacgccgccgccatcgcgcgccgtattgtacaggaacgtgcagttggtcaggcgatgggaggcggccttattgtaaatgcccccgcccatttccgatgcctgattgttgaaaaataccgtgttttctacaatcgccgaagcgccgagacaattgtgcatggcgccgcccaagaggccgtagttgccatagaagcggcagttggccacggaaactccgccgccatgattgtacatgccgccgccatatcccagactttcctctccgtccgcacgcccgccggtaatcgaaaacccgtcaagggtggcgcgattgtttccctcgataacatgataggccggaataccggggccgcggccgtttgaaccgtcaataatggtcgtgcgcactgcccagtcgcgctggttgcgttccgtctccgttcccgcgaatcccccgtacagatacacgcggcgctgggttatcatcaggctaccgttcggactgggacgggtttcgtcatagatcccttcggccacccagatttcgtcgtcccgtgccgccaaatccagcgcgggttggatggtttgaaaagccgtggcccaactcaagccatcttccgttccggacaaattatccctgtcaacgtaccatacccctgaaatagcaggaagggaacagagcattgtcagcacgaaaaaacggtctttttcataattcgtagatcctccctggcgcactaccccgctttgttttcatttaattaaacttccctcacatttgaattttacacttatcatagaaaaaagtcaaaaagttttttttgtattattaacttgagagtaccatgttctcgaagttgggaatgtaacgccgatttccaaatcggcttgttgaaacgcgacatgccgatttggaaatcggcgctacaaagcagccattttcaatttcaacacaagatctcgttgcctgatccgacatgaaattgcccggaaatgccaatcttcctggaaattctcatccttattgtctcgaatccgctgaaagaccgcgttggcgaataggtgttccttgtctgaaagggggccgatcccgtataagggttcaggcctattggaggaaacgggcgatgggacgcgtgaaggcgttttacgggaccgtggcggttctgggcggctttgtattgattacttactggggcatgatggttgtttggggcagcgggtcctggctgcatgggacgcgcagtcttcgtctcggccccatttatgtgccgatgttgctgttggggctggcgacgttgattgtcctgccggctttcctgttgagcgtgtgcaggatcatgcagactcgcggccgtttccctcgatggaccgggcttccgggcgccagttgcgcgatggcgtggcaggcgttgttgcttgcggcgctggtgctggttttcgacacgccatggtccggtttgtttcgcacggattgggccggggtttttcgcaatgcgggcaagccggcggttctcgaattgggcgacgaccacctgaattatcctgagctaccgcttcagcccgtggattattatgcgtggtccgtttacgatctcgacggacgggaagtgccgatggcgtcgttccgcggcaaaacgcttttcctgaatttctgggcgacgtggtgcatgccgtgccgttccgaaatgcccagcgtgcagcgtctttacgacgcggcgaaggataagggcgtggcgtttgcgtttgtttcgcgggaagaggcggagactgtccgcacgtttatgaaagcggaagggtacacgctgccggtgtatctggcgaaagaacgccccccggcgttcatggccattaccgggatccccgcaacgatgatctttgcccccgacggccaactggcatttcgccacacgggcgccgcggcgtgggacacacccaagactcttgagtttctcgcgaaactaaccggcgttccgtgaaatggacagtcccgtgaatgaaacgaaaccgcttggcgggggtgatatccggcgattgcgcgccgattttccgctgctgaccgattccggcgttccggtcatctatctggacaatgctgcgacgacccagaagccgcgcgccgtcattgatgcgcttacccggttctatgcgctacagaacgcgccggttcatcgcggcatttaccggcttggcgatcaggcctcggccttgtatgaacaggcgcggagccgggtgtcgcggttcattggagccggaagcagcagcgagatcgtgttcacgcgcggaacgacggaaagcatcaatctcgttgcgcagaccttcggacgtcggagactcgggcccggggatgaaattctcgtgaccgaaatggaacaccatgcaaatatcgtcccttggcaaatcgtctgccgggaacatggcgcgatcctgcgatggatacccgcgggccgggcgtgcgaagtgcgggccgatgaattggcgcggcgcctgggtccgcgcactcgcctgctggccgtcgtccatgtttccaatgtgaccggaaccgtcaatcccatcggctccctcatcgaaatcgcccatgcgaaaggggttcccgtgttggtggacggcgcccaagcggccggccatttgccggttgatgtgaccgcgctgggctgcgatttctatgcgttttccggccacaagatgctggggccgatgggcgtcgggatcctgtacggacgtggggatctgttgcgagacatgcccccgtggcaggggggcggcggcgcgattgcgcacgttggccgcgattcgtccaccttccgcgaaccgccggcgaaattcgaggccggcacgccgcccgtggcggaggccatcgccttggccgaggccatcgaatacatcgaacgggccgggcgcgcgcgcctcgcggcctatgagcaatccctgattcatcaggtcgagcgcggtctgaaagccattccgggcgtccggattcatggcgatcccgccgaacgggccgcggcggtttctttctctttggagggtgtgcatccgcatgacgtcagccagatgctcgatgaagacggtatcgccgtgcgcgcgggcaatctgtgcgcacagccgttgatggatgcgctgggcgttccaggagtcgttcgaatagcgcccgccttttacaacacaccggaagaaattgacttgacgatgcaagcgctggaccgcgtgcgcgggatttttcgatgaacctatacgaccaagtcctgctcgaccataaccggaatccgcggaatttccgccccatgcccggcgccacgcattccggcgaggcggataatccgctgtgcggcgatcgtatcgccgtttttctgcgcgtcgaggacggcgtcgtggccgaggcaagttttcagggcaaggcgtgcgccgtggccacggcatcggcctcgctcatgaccgtcgccgtgcagggggaggttgtggaggaagcgaaaaaaatgtgtctttccgtgaaggcttttctcaatgaccgggcggaaccggcgccgaccgcttcccttgccatgcttgaacgggtccgcgattatcctgttcgcatcggatgtgccgaattgccgtggacagcggttgccgccgcgttggcgacgggggaccgacagccctaaagcggatcgattggcaattcggggcaatctttttcatcagatggtattgacaatatgagaaatcagcgatatagtagtcgcgacaagtgatagcttgtgcagtttggcggcgaatagagaagtttgcgcgtcggtaaatgcgacaaaaacatgagaaaggagatcgttggggacgtttacccaagcaggtgatggccgaagtgtaagggcagttttccgaactactggcgaagtccaacacaaagggttgtcacatgaaaaagcaaggttttacgctcatcgaattgctggttgtcatcgccatcattggcatcttggcggcaatactgttgcccgcgcttgcccgagcccgtgaatcagcacgccgttcgagttgccagaacaacctgaaacagcttggcgtggtgtacaagatgtacgcgaacgaaaaccgcgcccagaaatttcccatgatggccgcccggttgtcgtatcaggtccagaatgcggaggtcatctacagttcgtacaacgaatgcggatacaacaatccgtatctgccgccgacggcgggcggcgacgcggaattcgtgccggacgggaagtccatttatcccgaatacctgacggacgtgaacatcctgatttgtccgtcggattcccaggcgaaaaaggcccagcagtactggtttatcaacggcaaggtggatccgtgcgcgattacggccgaatcgtacatgtacgtgaattgggccctgacaggacgcgacggcgaaggatatttgaaatccggcgcggatcccaatccgggcaatatgcccttgggcgtggcggcgattggcacgtatctggatcttggcttcatcaccaaggtcaacacgcttctcacgcagcagtcggccatcgatccccccggctcgcaaaacctgtatgacaccgacttcaagttcacgaaccaggacggaaaagaaatcaccatctatcagatgcgggagggtatcgagcggtttttcatcaccgacatcaacaatcccggcgcaacgacgcgcgcgcaaagcgtcattcccatcgaatgggatcttgccagcacgaccgccgatgagttcaaccacgtgcccggcggatcaaacgtcatgtttctggacggacacgtcgagttcatcaagtatccgggcgaatttccgattacgcaggcctttgccgtcatgacgtccatgttctagcgtcgtgagtcgccgatgcaagggacaaacgaccacagcaagtgaacaaaagggactgacccgcttttcgggagtttgatcagcggatcagtctttccttttttcgcggcctttctttcatccttgcccggcttgccgaaaaagaactcgatgcgaagatgtgggaagaggcgaagcattgcacccgcatcccgcattcaagtttgaatcgcttgcatcgaacatgtaggtctttttttcaatctctgggtatctgcgtcatctgtggaagatcggaagacggtccgtggatgccgaaaaaaggaagtgggattgtctttgccccaatcgcctgcaaagaacttgacgcaaagggctggaaaacgggactcctgaaaaaagcgcggttattccggtttctcttccacggccgggtccgggacgaaaaaggccagggaagcgaaactgatggaggttcgggtgtcgcccgttttgcgcgcggaaatgtcatgggccagcaggcggccggttgcggatttcggcacgatccgcagcaggatggcgatggcgtttttcgcgcagattggattgcgggtatcgtcgagatagcggacaaagccccggaaatcccgcgtgagaatgaggcggaacgcctccttgtccagtgcttcgatggattcgatgatgttttccttgaaagggcggtaactgaagttgttgccgtaatgcgtaaagtcggaactgacgaccagcagggtccgatcatccatcagggggtgaagcgatttcgcgacggcttcgatcgcgtccacgtcggtcttcttctggtaatcaaggaaatcgccgactaggatggggatcaagcggaacgttccaaggcgttcctggaggaagggcaacgtcgcctcgattgaatattcgatttcgtggacttgcacgcgggacgaatcggcctggtagttgacgctacgcacttcgatgagcggcgaaagatccaactgccggatgctttggccatccaacggaatgctgcccaagggggtttggtaaaactcgaccgacggaatcgagcaaccgcggaaggaactccggtgcgacgcccccagcacgataacgcgatcgtattgtcccggctgaagcattcccagcgcggcgcccgcaatggcgccggatgtctggtacggcgcatgcggcacgatgcatgccgccattcgttcgcccgccgggggccgcgcgtctttcatgcactccttcagggccgattccagcgctgctttgtcggctggataccagacacccgcggcgaccggcagggcaaaacgcgttacagcttcggacaagccgctccacagaagcgtcaggcagatgccgtaaaaaatgtggcgccgcatcgcgcgttgtctcccgttgtcggaacgtatctgaaaatgtatcgaatcggctgcaggattgtccatgtgaatggttgaacaaccgagcggccgtttagggtatggttcgatggttcattgctgttcaggcgcaatgcttgggcatgggcagggctttgccggccttggatgatttttcggcggtggcgatcaccgcgatgacgcgccgggcgctttcgggggtcacgacaagcggctcgccgagcatgagatgatcggcaatgttgcgataataggcgtgccagtcggactcgaagtacttgagcgtcgcctcggatcgcacgccgtcgcggtaactgatgacagtaaacttgtcgtcatcgtagtcgaggatgccgcctttcgtacccaggatgcgccatcgcggtttgccggccgcggcgatttgcgacaattcgatgaaggcgctgcatccgttcgagaagcgcaccgtggccgagcaatggtcctcgttggtgacatcgtgccagacgcgtttttcctggaaatagccggagacctcgacgatttgcgccggaacgagtccgagggtccaatcaacgacgtgtgcgccccaatcgtagaacgcgccgccgctgatctttttttcggaccgccaccagtaactcggatggccgtatccgcccatgcaggcctcgatatggaaaacctcgccgatcaggccgctggcgatcgcgtgtttgatggccatgtagtcgccgtcccagcggcggttgtgaaagacgctcaacatgcgcctgttcctgcgggcggcggcgatcatcgcatcggcttcttcgatggtgatgcagaagggtttctcggtgatcgcatggacgccggcattcaggcattcgatgacccgtttggcgtgatcgttgtgctcggtgatgaccgtggcgagttccacgcctgatttttcaagcatttttcgtgaggaggcgtaggtcggaatgccgggaaagtcctcctcggcctcaatccggcgctgttcgacaaggtcgcatgcggccacaatttcaaaaccggcggcgcgcatgctttcgagatgaagtcggcccatcttgaacgattttccgtatccgatgacgcccgccttcatggatttgatctctttgcgaccaaaggtccagtccacgcccctccggatcattttctggacttcggggtgattcagcgagcgttcgtcgtggcccagcgcgaggaaaaagacccggcctttgccgtgggtccgtgtgtatgccatgggctgcggcttgccccgccacatggccgttgcaaggacttcgcaggaatccgcctggaatttgtcgagcagatacagttcgtccgtcacgcggaaaggttgtatccgccgcgtgatcatcgaatccgccgctgtcggcgtcacgggaaactcgaattgcgcatcgtgcccggcaaacgtcgagccgagcatgtccacataagccgcatttttcgtgaacgaggccgccgcgccatgcaatccgatgaatgcgccgccattcttcacgaaattgacaagcccattttcctgatctttccgtagttccccgccgtcggcataaacgattgccgcatcaaaacgcccgatatttcccgcgcgcagcgtgtttaggtcgtgcgtcggtgtgaccagataccgcccggtgtcttccagaagtttttttacaatttcgccgcaccgatcgaggggatgatattgtccccccagtaccatgaggatttttttcatcgtcgccattccgcgtcctttctctgctataattacacggtgtcaaagtgcattgagtgcgattttacgtacataacggaggaataacaaatcgccgcgggcggggaggcaatgacgaaaatggatggggaggcgaaagtggttgcctgtgccgcatgcggtcatgtcatgaaaattccgccccagtatgccgatacgccggggcggtgtggccggtgtggcgccacggtaaacgatcgcgttttgatacccgccattgatctgtccgatctggggccgccatcccccaaaaagaagacatctgcggccgtccagaattcagaaaccttttcgactactgttcgccgggcgttgctggcggggttggccggtgctttggttggggggggtgtcgtaggcgctttctttactattcgtcgcacggaggggcaggccatcacgccgggcactcttttcgcaaacgccaacacggggctcgtgctcggtttcacgatatgttcgctgtttttctttgtcaagcatttgaattggggaccgttcagggcggccggggctggaatgctcagttgtgtcgtgatcggctccgtcatgtttctcttggaagcccgtttggttgccccgccggacataggtttgtttgcccaaatcgcgatggccgccatggcgggaggggtcgcggggttgatcatgggggccaaattgaacaacgaagactgaccgtatgccggagacctcggccgccatcatgttccaattcataaggagatggcggatcacacattgaatctccgccattgcagccgttttttggggcctatcccatcgcgtgtgcgcgggccgctggggttcgtttttttgaatcatgttattagggaggcatatacttttttcgatcgttgagggaacgggaggtgagcgatgcaaagagtgagtgtgttggcttttttgctgttatggtgtggggttgctttttcggtcgagttcgtgtttgaagaacaacccggatcgtgcctgttgaaaggcgatggaaaaacgtggatggccacgatgatggccgctttcgatccggcaaaacgcgatgagacatacaaagtctacacacatatccacgattttcagggcatcgccccgattaccaagggaccgggcgggaaatatccgcatcatcgcggtatgttcattggctggaaggatgtcgtggccaacggtctccacttcaatttgtgggaaatggcgaatacctcgcagcgccatgtggcgtggctggaacgcaaaggagggctggactccgcgcggcaatcggagcgcatccactggtgcgatccggagggaaaagtgcttatcgaggagacgcggacccttgccgtccggcccggtcccggcggcgtgcgccttttcgattttcagtctgtgcttttggccccgtccggcgacatccagttgcgcggggatcttcagcacgccggcatgcaggtccgcatggcgcaagaagtggcggaccatgaagattcgacgaaatacattttgcccgaaggcgcccaggaactgccggacgacaaggtcgtgggtgcatggtgggtatgttgcagtccggttgtgcgcgatgtgcgctattgggtcgttcatatgacaccgtccggtcatccgttgggtcagccggtgtattcgattcgccggtatgcgcgattcggtgcgttttttgagccggacttgcaggccggaaagccatcggcattctcgtttcgcattgcggtatcggacaaggaactggaccgcgccgcctgcgaatcgctgtatgccgattattgcaagcccgccccctgattcgattcggagacttacgcgtgcgcaagttggcggtcacattctacggcatcattcacggatcgttgatcaaggaatgcgccgtcgtgccggaacagcgcgcggaactgtgcatggaaggcgacccgtggctggcgacggtttcgacgccctacgatccctccgcccattcggatacctgcaaagtctttacgcatttgtatagtccttgcgacgggctgccgattacaaaaggggcgggcggtttcgattcgcatcagcgtggcctgcatatcggctggcgacgcacggaagtggaagggcggaacttcgacacgtggcatatgacggattgttcccagcgccatggcggatggctggctgaaccggggcatgtggccgcccacgcgttcatcgtggattggtgcgacgcgggggggcggcctttcctgcgcgagtttcggtccgtgttgtgccgccgcgcgcgatatggcgcgcgcatgttcgatttgcagtcgcggctggccgccgtggaccgtcctgtcgccctgcgcggggacccgcaccatgccggtgtccagattcgcctggcgaatgaagtttgccggcggccgtggggcacccggttcgtgctgccgggcaatgcacaacgccggcgcaacgatgtcgtgcgcgatgcgctctgggtttgctgcctttccactattcgagacaagcgccatgccgttttgcacatgacccatcccgccaatccgggtctcgaacatctagtctatgggatacgcgcctatgggcgtttcggggcctttttcgatgcggatttgaagcccgggtttcccatgcgcatgcgtttccgaatcctgtggaccgagggcgaattggacagagatgaatgcgaggctctctatcgcgagtacacctcatccttctgaacattacaagcccggcaaggcaatgataattcccgccttgtgggcaggatgaacgatggggaccccatggacttgattcggcgcctgatatcttatcgtctccgccgcggtccacggcgtcgctggtgtggacgtttacggtgggaactgtcgcgctggggttcgcgggggctttcgggaacccggatcgtctcggcgggaatgtaacgggcgagtttgtcttcggtcgagttgtaacagtcgcagcggggacaccttgaaagccgttcggcctgctcgtcaaggtagatatatccgcaaaacgtgcaccgccagagaaactgtttggttaggaccgcctgtattctccgggaaacgatttccgtatgcgtccagatgacaatggccagcgcgcacagcagggcgctgtaaaaaacgagcgcggaggtaagcgaaatctggatcatgatgatggcgcccctgctttttcgtgatcatccacggtctttgccgatggccgtttgccgttcccgtcttcctttccgggtgtcgccagcgtgaagagtccggcttggggcgtcatgggtatgtgccgcattgcttccctcatgatccgccctcgacctcgacgaataacgtgccgcgttgcaagtggacgttttcaatcggttcgaattgaaaacggggaagcacagtttggagttccgagacgacgccggtggcgtcttcgatggaagtttggacgttttccacttttcctttttcgttgacgctgaaaataatcgaaatgggagccgtaagccgggccggttccaggcgccacagggaagcgatcggaggaacaaacagggcgcggcgatcccgtggatcggacatccattcgacgaacagcgcaattccgggcgccggacattccaaccgcacgcggttgggcgttgtttgatcggttcggggccatgcccattgcgagagcgcggggccgattccgcgcaattcgctggtgaaccgcgcccatgaatcgggcgtgtcggcctcgcgcgtctcgaagagttcgctgaactgggaacgaatcttaagactttcttccgggctgcgcaagaccggcagggacgacgcgagccggggtagttcgacgggtggcagcaagtcggtatccgattcatcggccaacgcgagcagattcgggtaccgatcggtcggcatcggctgatcgctgtccggggttgggggttggacaaggccgatggtaaattgccgtgtttcgggttttggcagaagaatcacgatcgaaaaaaccgataccatcgaaagatgaaacaggaccgagacggcgagtgctatgttaaaagcggatgcgcgcggcatgacgcgttaccgttgcggcggcccggcgggacgggcggcaatcgtgcaatggcggatgccggcgtcgttgaccagtccgagcacttcgatgagccgcgcgctttcgatgcgggcatcgggccggattacgacggtgatgtccgggcgttgcgcatgcgcctctgcgagaatgcgcgaaacttcgtcgaatccgcccacctgctcctcattcacaaaaatcccgccctcatgcgaaagcgtgattgacaagtctttttcctcgtatgcggacggcccggcggcctcggcggtcttgatggtcacggggaactgcgtggcgaaggttgttcccagcatgaagaaaatcaacaggttcagaacgacgtccatgagggccgtcatatcgatcgtggggcggatcctgggcttccgttccttgcggaaccgtatgaggcgtttatccgccgccgcttgcatcatggggcctatccgtcctcgccggttcggtgcattgtcatcaattcaacggcttccgatgcgccgacttccatttcaacgatcatggtgtccacgcgcgtaacgaaataattgtacgccaccatggcgggaatgcccacaacaagccccgcaaacgtcgtgatcagggcatttccaatgccttcggcgagatcggaagggtttaccatgcctcggcggttctcgatggccgcgaagcatttgatcatcccttggaccgtacccagcaggccgagcaacggcgcgacttgcgcgcaggttcccagtccggcgagataacgttcgagacggggtatttccagccgtcccgcgtcttcaatggcctcgcggatatcggttttggtgcggttgtgcttgaccaggcccgcttttacgatgcgcgcgatgggcgcacgggtttcgtcgcaggtttgcaacgcctcctggacgcgatcctgccgtagcgcggcgcggatcagatccatgaattcccgcgtgacgactgtgatgcggcgcagcgtgtagaagcgctcgatcgcgatggccaacgcgacgatcgagcaaacgaaaatcggccacatcaccacgccgcccctgccgatcaattcgtatgcggtgttgtatcctgccggtaacatggcttcaagcctccggtaagtctaaagcgtgacgagcgtgcccacgcccttgtccgtaaaaatttcaagcagaagcgcgtgtggaacgcgtccgtcaatgatgtgggtgcgcgatacgccgtgatccagcgccttgatgcatgcgtccactttcggaatcatgccgcccgcgatgattccctcgcgcgtcaactgggccacctcgccgtgccgcagatggtgaatcagcgaatccgggtcgtccttgtcgcgcagcacacccggcgtgtccgtcagaaagacaagtttttcggcctgaagcgccgcggccacttcgcccgcggcggtgtccgcattgatgttccacgtgcccccctccgcgtctgtcgcgagtggggcgacgacgggaatcatgcctgccgcgcagagcacgttgaggatgcgggcatgcacattgacaatctggccgacatgtccgatatcggcgccgtcctcgaactcgatctttcgcgcgtgcagcagattcgcatccttgccggaaaggccgacggcctgcccgccggcttggttgagcagcgtgacgatgtccttgttgaccgttcctgccaggatcatttccacgacttcaatggcggcgtcgtcggtgacacggcgcccctgatggaacttggattcgatggccagccgtttcaacatgccgttgatggccggtccgccgccgtgtacgacgatcggattcatgccgacatatttcatcaacacgacatcttccgccgtgctcttgcggatgcggggatccgtcatggcgctgccgccgtacttgataacgaccgtcttgccctcgaacttccgaatgtacggcaacgcctcgaccaacaccgatgctttttgtataaccgcttccatttttctccttctgtcgtgcccgcaagcgcctcgggcggcaactacgtcctgtaatctgcattgatttccacgtagttgtggctcaaatccgatgtccagaatacggtttttcccggtccatttccgacttccacgcgaatgcggaattccggcttgcgcatgcaggccgccgcgtcttcttccttgtattcggccggcatcccgttgcgcatgacttggatatcgtcaatccacatgcacagtttctccgggatgaacgatgcgccggaatagcctgcggcgcaggcgaaacgcccccagttggggtcttgcccaaaaaaggccgtcttgcacagttgggatgtcgcgatggcgcgcgcgatgatctttgcgtcgttgtcggaagaggcgccattcacggcaatttcgacgaattttgtcgcaccttccccgtcacgtaccagcgattgggccatgtgaatgcacacgtcgcgcaatgctgcggcaaagcgcccgaagtcgtccgtgcccggctgtagaaccggcgtgcccgatgccccgttcgccaaacagatgaccgagtcgcttgtgctcatgtcgttgtccacgcatatttgattgaaggatacctcgacggattcgcgcagaatcttggcgagcggctccggttcgatggcggcatccgtggtcaacaggcagaacatggtggccatgttgggcgcaatcatgcccgcgcccttcgcgatggcgcccagccgcaccgtgccgcccgaaagcgctagttcgacggctgtttctttcgggacggtatccgtggtcatgatggcggcggcggcatccgcgctgccgtccgcgcgcagcgatgccaggcattcccgcacgccgttcgcgatacggtccatcggcaacgggaggccaatgactcccgtgctcaacacgcagatctcctcggatcgtgcgccgatgccttcggcaaccatttttgccgttgcctgggcatcggcatagccgcgatcgcccgtgcaggcgtttgcgttgccgctgttcgcgaaaatcgcccgcgcgacgccgcgcgtgcatacgctttcactccagcgcaccggaggcgccttgaataggttgcgcgtgaatgtgccggccgctgtcgccaatcggtcgctgacgatgagcgcgcaatcctttttggtcgaattcggcttgatggccgcagcgacgcctgttgcttggaagccttttgccgccgtcacgccgcccgggatggtcgtcatggcatcatccccgccagtttaaggccggtcgtctccggcagcccgaacatgacattcatgcactgcaccgccatgcctgccgtgccgccgacgaggttgtctatggcgctgacgataatcaggtttttggtgcgtttgtccacgacccaaccgatatcgcagaaattcgagccacgcacataacggatttccgccggtttgccttcgccgagcacgcgcacgaacggctcgtccgcgtagcgttcatagcaggccgccacatcgaagatttccttgagatgcacggttatcgtgctgagaattccgcgtgtgtaggcgcctacgtgcggcgtgaactgcaccgtaaaggccttcagcagctcctgttcgatttccggcgtatgctggtgatttccgatacggtaggccttgacgttttcattcatttccgggaagtggaaagcctccgccacggcccggcccgcgcccgaaagacccgaaatcgcgtccacaacgattggtacatccttgtcaatgggagcgtccacgagcggtcgcatcggcaagatcacgcttgcagggtagcaaccaggcgccgccaccaattgggcgtctcgcaattgatcgcgataatagggaacaaggccgtacaccgcttcccgcacccattggcccgccgtgtgctcgaccttgtagtattcggagtagagacgcagatccttgatgcggaagtccggacccatgtccaccgtgcgaacgcccgcctcgcgcaatgccgcgcccaacgccatggacttcgtgcccggcaccgcgatgaacaccacgtcgcacttcttcgccaacgccgccgggtcgaatttttcgcataccacatccacgagtttaccaaaggccggcaacaattcctggatggattttcctgcctcgacttccgccgcggccaccagtttcgcctcgggatgcaaattcagcaggcgtatcaattcacgcccgccgtaaccaatggcgcctacaagacctacacgtatcatgaaatacacctccgtgggatggattggaaacagccggattatagtccgctgtcggcagggcaatcaaagaaagctcacacattcgacgaattttctactgcagcagccacgcgacaccggcgccgcccaggatgacccaaggcaccttggcgcgcaggagcaaggccgcaaacgccgccgttccgactgcggccaacgatggattccagggcacttccatgccgagcatcgcggtggtggcaagaaggaggccgacgaaggatgccacggctccacgaagcacgcaccggactgcgggacggcggcgcaggcggtggaattccggggccagcgccagcagcaccagaaacgagggaaggaagatccccatggtcgccgcgcaggccccggccagcccttcgcgcatgtagcccacgaatgtggcggtgatgatgatcggtccgggcgtgacttggcccagtgcgatgccgtccatgaatgtccgcgcgtccagccaatgccgggcatccaccacctcgtgcagcatgatggggagggcggcgtatcctccgccgaaggcaaacaggtcaatccgcatcatcgtgaaggccagattgaaaagcgagcggtccacgaagaaaagcaccaccatgccggccaacgctgcggacacgacaagcgcggccgcccgccatgcgtttctccgttgcgtaaagggcgcgggcgatcgcggcgattcttcgtcgcccacacgccggtaaagccaaaatccggccaaggccgcgacggggatggcgatatacggaacgccgccaagtccgagatagatcgcgacactgaaggccagcagtacgtcctgccgatacttcacaaattcccggccgaaggaccacgccgcatgcgccaccaaggccacgaccacagcctgcaatccgttgaacattgcaagaatagacggcaaattgtgtgtccggctgtacacggcggacagggcgagcatgagtagaaacgccggcagtccaaaacccacaaaggccgccagcgccccgcgaatgccgccgatgcgcaatcccaaataccccgccatctgcattcccgtggcgccgggaatcgcctggcacagtccgatgccgtcgtcgaatgcctcggcccttacccagccgcgactccgcacgagatcttcgcgtagatgaacgatgatggccggtccgccgaacgccgagcacccgagaatcaaaaaggtccggaatatttgccacaggtttggattcggcatgggtcgaatcggttgctggtttgtttgcatgtcctggatgatatcatttttcccgcatccaattttggtattgccgggtagggacacctctgtcctgtactcaatccgctcgtatctgcgtcatccgcggaaggccatgcggtcaaccgaggacgcggctattcgtagatgctgaaaagatgaatggggaatcaacgcaagcccgatttcagccagccgcttgtcacgcctcgacggtttgccgtttggggagacgcaccacaaatcgcgtgttcgaggacgcggcgtccaagaacaagtcgccgtggtggttttcgaccatccggcgcgaaatgctcaaaccaagaccgatgccgccgatggtctgtttcgtggtgaagaaggggacaaaggccatttcctgaagatccctgcccaagccgtgtccactgtcggttatggcaaatcgaatagtcgtcccttcatcttcgacgtcgagccgtatccatttttccggcaattctttgacggcgtcgtaggcattgttgatcaggttgagcagcacttggcccaattgggcagagcggcattcaatatggagttcattcggtatgggcgacaccgtcagtgtgatgccggcgtctctacagcgcgccatgcacacttccagtgtttctgtgacgatggtggcgaccgattcccgcacgaatgcgtcggacgagccgtccctggacaaattccgcagtccttggacaatatgttgaacgcgcttgacattgcgcacgatggtcttggtcacgtttgcccggtattcgtttgaaaggcggggatcgtcgagacttcgttcgagttgttcggcgccgaccgaaataatggccatgggattgtttatctcgtgcgcgatgccgcttgccatcgtgcccaaggccgacaggcgcgccgcgttcagcatgagcaactgctgttcgatgattaggcgctgcgcctttacgcgttcggtgatgtcgtttccgatgcaaaggatttcttttatgcggccgttttcgtcgcggatcggccggttggtccacgatatccagacgatgtccccgtttttccggcagttttcgttttcattgcacagatactgttccgggtgttccccgatgccctttatcattgcctcgtgggcgcgcccgtcggaatcttccgggcgcaggatggttccgatgacattgcgtccgatgatttcctcctcggtgtacccgaaaaattcctgcgcgaaatgattgaagaaaaggatgttgccgttcacgtccatgcgcatgatgacgctgttggcgctctcgaccagttcgcggtatttcgcctcgctttcgcgaagggcctcctcggcttttttgcggcgatcaatatcgcgtgtgatgccctgaaatccgagcaatttgccttccgaatcgaacaggggcgccgacaccgtttcggtccaaatcaaggttccgtcctttcggatttgctccagttcataggtcgcgcttcccggattgattccctgttccatgagtttcaaacgctcgctgaattgcgccttgaacgaggcaagcgaccgcggggttataaattccaaaacggatcgcccaatgacttcttccgctttgtatccccgctgccgttcgtccgccgggctgacatacgccgcgcgcagatcgggtgtcaactgccaaaaaacatcgtccacgctttctatcatgaaccggagggattcctcgctttctttcagcgcctcctcggcctgcttgcgttccgtgatgtcgcggcccaccgactgggtttcgatcaggcgtcccgttttatcgaagaagccccggttgacaaactgcatccagcggatttcccccgtgccggcatagacacggttttcgataacaacgacggggttgtccggcgacatctttccgagttgctcttcgatgatcggacggtcatcctcatgcgccaggggttgccagggtttttcaatcagatcgtttcttgttttattgaaaaagcggcaaaaaacgtcgttcacaaacacgaatgtgccatcgggccggaaccggctgatgatttccgtctgatcctccaagacagtccggtagcgttgctcgctgtcgcgcaaagccgtttcgatgaggcggcgttcggcgatttcttgttccaattgccggttgatccgcatcagttcggcggtgcgttcggccacgcgattttcaagttgtgctcgcgtctgctcaagctcctcgaacgctttccgtttttcctccatctggacacggagcgtttcctgttcgacttggagccgttgcttggcccggtgggtttcatacactccccagaagaggccgccgatgaacaatacaatgccggtgctcatgagcggttccttgaccagatggaacggcctcacgaccggacgcacattgccgccgaaagatgagatgccatccatgacattgatgatctggccggccaagataagggcgatgccgatggccgccagaaaagtgatcggccgtacggcatacacgacggacaagacaaacgtggtcccaatgcccaacagaagtagactgaaaaaagtaatggtatcggcgataaaaaaactataccagccttggtaaaagcccacacggcccagtaaatgaagggaaagaaccagcgacagtgaaatgacgacataccacgcgacgcgcggcggcaaatcatattttgtcgccggagatgccccttgatcggcttccgccttctccggttcgttcccgtcacgcctcatgaaatacccctgccctgttcgggccgttgctccctgctcctacctttcccgtatgccggtttcattgtactactttctcgccaaaattgaaaggcctctgtttgaaccaccgcgtaaagcgtcgtagactatattccgccaagtgcgagaggagaagcgccgatgtcggaaacgaagaagtttcgcgtgggggttatcggggtgggttcgattgcgcaggcgtgccacctgccgggttatctcaaagatgatcgggcgcaattggtggctttcgccgaccccgaaccggagcgccacaaggagatggcgctgtcctatggcgagatgcggggctatgcgcattaccgcgacatgcttgcccgggaaaaactcgatgtcgtcagcgtgtgcacgccgaacaagtatcatgccgaagccgtaatcgccgcgctggaggcgaaatgccatgtcttgtgcgaaaagcccatttcaacgacgctgcaagaggccgacctgatgatcgccgccgcgagaaaagtccggcgcaaactgatgattggcttcacgcaccggcttttcaatggcccgaagaaatgcaaggaactactcgaggagaagacgctgggaaaaccgttcatgatccgcgtgcggtttgcgcatggcgggccgtttcccggctgggccaagagtgattggttttaccagaagaatctggcggcaggcggcgcgatgctggacatgggcattcatgcgattgatttatgcctgtggcttttcggcccgatcgtggccgtaagcgccaaggcggcgacgctcgtcaagaaaatcgaagtggatgacaatgcgttgttgctgctcgaattcaaaagcggcgcgctcggatacatcgaagtgggctggaccagccgtcccggattcagcggccttgaaatctacgggaccgagggatccatcatctgcgactacacgcggggcgtgtatctggtggggggcaaggcatcggcggggcgcgacggcaaacacgaatggaaaacgctggacaaatcgcccacggaagggggatggtccacggagatgggctactggctcgatgtggtcacgggggtggaaaaactgaccatggacggcagggccggacgggatgcgttggaagtggcgctggcggcctacaagtcgagccagaccgccaagcgcgtcaccatcgaataagccgcctgcaacctttcgcgcggcgcgggtatatcattgagaaggagggttgccatgattcgcgggctatttgtttcgattggcctttccgtgctggttcttgttccggatactgcgttggcgcaacgcgagccaagggctttccgaaccatcaacacggatcaatacgaggtggccgttcacaagaatggcctgattgacattcgggtgaaccggatcgaaaccattgccaccggtctgtatccgatgatctggattgagggggaggccgcgccgaaaccttttcccgttgatgcgcgatacagcaaccgcgctcccgtgaacaaccgccttggagaaggacaggggatgtggttcaagaaggggacgctggattggattgtggagacgtaccccacaaaacctttcatgacgattcaagtggcgttcgaaaacacaaccaaaaagcccgtgacgatcaaggcgctgattccatgggcgcttggaggcgagaaaaagggttcgctcaatctggggttgggttccggcgggtccgttattcttgaaaacggccgccatctgggtttgaccgacgaagttccccaagtcgtcgccgggaagacgcaatgtctaagcaattgcacggccttcaatccgaccagcggattgtcgttgacggcgggttttctgaccatgcggcatgcgtacggacgaatcatgcttgaattggatgacgatccgacgagggccgtcatgcgcgccgactgtatatttgatccgccgatcgaggttccgcccggaaagcgcctcgaatcggagattttttatgtggcccttactgaacgaaaccccttcgacgggttggagcatttcgggcaggccgtcggcgcgttcaacgatgccggcccgcaaggtttccggttgccgcacggttgggattcatggaacaccgccctcaagagcgacatcaacgaatcgaacgttttggcggcgttggatgtgttcgatcgcgatttgaaacgttacggttggacgcattttgcgattgggggcggttggcagcaggccacgggaacctgggaaccggattccgcgaagtttccgcatggcatgaaatggctggccgaccagatccattcgcgaaaaatgacggccggcctttggttggatccgtttaccgcccatgtaaacagcgccgttgcgcgggaacatccggattggttgcgccaaccggccgaggcgtaccgttccatgctggacccggatgatcgcatcatagatgtgacaatccccgaggcgtacgcgtgggtgcgggatctggctgtacgcgtcgggaacgattggggattcgacacgttgcagcagggcgattttgcatgccggttgctgtatgcggatcggtacgccgcggtgggtgttacgcgcgtggatgtgtttcggatgggcgtgcaagccttgcgcgaagggctaggcggggaatcgttgattacctctttttccccggcgcaggtcacggcgccggtttggcgtcgggagacaggccggaaaccttggggatgtgtcgaggcgatgacgaacgccgcccggcgctattattttgcgccgcattgttggatagccgacacggactgttcctattttgggattgattccacacgggaacggtggagtgtgggccatagacctcccttgtccgccgaacaggcgcaggcatggctgacggccgccgccctgaccggcggcgtgatcaaaatgggcgattggcctccggacctcgacgccggacagcgcgcccttttgacacggcttctgcccaccattggccgctctgcgcgccctgtcgatctctttgaaggcaaaacgcctgcgatttggtcgcttccgattcaatgcgccgtgggatcatggcatgtcgtcgccgtattcaactggaacgatgccgcccctgccaagattcccctcgatttcacaaacctgggtctcaatttcaaccgctactataccgtctatgatttctggcgcgacaagttctatggcctcgccaaggggaggctgatgctcgacatgccgccgggcagcgtgcggctgctgggtctgcgagcctatgagggccgaccgatgtttctcgccacggatcggcatttcacgcaaggggccaccgatttcacccgcctcgaatggaatgcgcaaacccgcctcttgtcgggaacatttaccggcattgcggagacggattataacctgcgtatttttgtgccggacgaatatgcggtgaaatcgtcctattgttcggcggaagcgcccaaaacggaacaggacgggaaagtttacaaactcggttttcgctgtatcgaatcagcaccggtcaactggaacgttcagttctgaaccgcaaggcggtggatttcccacgcgatcgcgccgtttatcaggcccgacgcggcgagcaagggcacgtcgtagccttcgaggggcacgcaggcgtcgggccaatcccacatgggatcaatccatataacgccgcgatcatgagcaaaatcgcgttcgtgccggagcgccgtgaaagcgacacgggcgccggccggccgtgccttgcggaggagatcgtccggcggctgctggtatccgatgagcacaatcatgtcgccgggacgataaacgtcatcgggtttcggcgacgtgcggaatcccgcgttccacacgtccgaatgaaacagttttccgatgtctgttttacccacttcgtccggaaacaggtggcccatgctgtacatgaacaattgtgcgccccgctttctcgccgctcggcaccatgcgcctgttttgtcgagttggcggcgttgttcgcgatccacgcgatccagcatggccttgattgtgttgatatagcggttggcgatgacacccgctgccacgggggggacttctttatcgtcgtgaaaggcaatatcgccgttcttgtactgcgtgatgcgcgggatgccgctgtatgagccgatactttcgtaaatgaccggcattttgccgagccgggtcaacgcggcgatcgtttcgccggtaaaaatccatgcgggaatggcgtttgccagcgtgggggagatgcctgcctcttcggcatgattcggaaaaaacggccattgatcatgaaccggccttgaaccgaaggtcactacaagcgcctgcgtgtttttcagggggtcaggcatgccggcgccgatttcgggcgtgtacaaaaccacatcggcgggatcaggcggctcgcttcccagtgcgcgaatcatcataaagccgccggcgcgtccgctgatttcgctgacgagcgagggctggcccgccgcccatagtttccctccgttggccagagcggcggcggcccgttcggcaaccggctgcatggcggataggtcgccccgggcacattcgatcgcatgcgccacgcgcgccagatacgaaccgttgatcggggcggccatggccgcactcattatgccgataatcgccgtcatcatgcgcggaaaccctttacttgaaagacagtcggaacccttttcccgaaacgactatcggatccaccgtgggaacatcgcccgattcgggcaatagaatccgcatgggggaaaaatccagaatatctttcctgatgtcaatgccgggcacgatacgcaccagttccataccgcgcggcgtcaactggaaaatgcccacattggacacgtaaagcactttcttgcccgtggcaagcgcttggcgtccactgaaggtaatttcgtccacattggcgatgaatttcggcttgccgtattcgacgatgcgcagggcattgccttccagacgaatctttccacccagcatccaactactgacgaagataatcgtccgcgccgcggtcgtgaagtcaatgaatccccccggtccgacgtaattgattgcgccctcgccgcgtttggaaacgttgacgtttccatcgctgtcacattgcagcatccccaggatgctcacatccaggctttcgtagcaccgatggaaaatttccgcgctggtaatcatctttttgggacatatcgcagcgccgaaaaagacgcccggcgctggcaatccaccaatgacgccgctttccgtaaacagggtgatgtcctcgtagagtcccgcctcgtacagcagccggcaaacttcttccggcaggccgacgccgatgttgaccaggctgccccggcgaacgttttccgcgaaagccgtcgcggccaagcgcgcaagcgaatcgtccaccgctgtgcgtctcggcgtgatgcgcagagtttcgttggcgtacttgagtttggcaacgctttccgcgatcggcatgtcgctttcggtagtgaacatcggccagtgtttgcgatgtttgacggaacccgtctgttccgtgcgggggtagacaacgaccgcgtccacatccgatgccggcagaaagatatcgtccgaatttttttcgacgacgtacccgacattgacgataaccaatccaccgtttgcccgcgcggcctttgcaatttcgcgactctccgcgagcatggccgtgtgcctcatgtagatattgccttcgcggtccgccgatggcgcgttgaacatcgcgaccgttatcgggggaagccggtagcgcaatttgccgttttcaaccgcaacccattgttccccggcgggcggtgtcacgggcgatccgcgccccacgcgcggatccatgaatgtgccgatgccggtgcttgtcaacagggatgtttccccgtggccttggccctcgatgaggaacgccataaccccttggggaatgcattggagttccagttttccttggtctgccagacgaagcatcgccttgaaggtttcgagatgtccgctgaaaaaacgcgtgcataagccgggaaggccgagttcttccagcgatcccggcgcgcggccccgagcgcccatgcccccaatcgccatgacggtcaaatcgcgcgggtggcccgtttcctgaaacaattcccgaatggaccaatacaggatggacgcccattgattggcgcccaaacccgaagcggccacgacggcgccgtcggggatcaatttgacggcgtcacgcggtcccatgaatttcggattgtcgggaatcgtgaaccgataatgcgtgtcgcgccggttccatgtcagccgccatttgagaacgtgatacaatacggaaatcttggaaaatagtgtcatgaggggtacttcctctttgaatccgtgacgtaagatagccgcttcaagaccgaaaagcaagagatatcggcgcggccactttacatggccgattccgttgcgctaccgtacccgtcaaaccggaacgaaaaaaaggatcgaagtatgaaagcgcctgtcgggattggggtattgagttttgcgcatggccatgtcggtgcgtatgtggacgtgatgaagaattttgccgatgtgagactggtgtcggcatacgacgacaatgagcaacggggcaagggggtgtgtgacaatgcggggatgcgctacacgccgcatgtcgaagatgtcttggacgatccgaatgtgcaggcggtcatggtgggcagcgagacatgccggcacgcagaattgtgcgtcgcggcggcgcgggccggaaagcacatcctctgccagaagcctatggccctctcgctcgaggattgcgaccgcatgatcgcggcggcggaaaaagcgggcgtgatgcttgccgtggccttccagatgcgtcacgacccggccaacatccggatgcgcgagattgtccagtcgggcgaattgggccgcatcgcggtcattcgccgccgccactgcatcggcgtgctgctcatggaatcgttcgtcaacgggccgacgcattggcatatcgaggccgacaagaacatgggcatgttcatggatgacgcgacgcatcccgccgactggttccactggatgctcggcaagcccgtcagcgtgatagccgaaattgacaatgtaatcacccatgtcgcgcccgacgacaacggtgtggccgtgttccgtttcgcacagggggaaatggggatcgttttcaacagttcgacggtcatggcgtcggaaaacacgaccgaaatctacggggagaaaggctgcgtgattcaaaattacggggacgcgccgtcgtgcgacacgcggctgcctggcgggatagccgtcaagatgttcaagtacggcgagggcaagtggcaggacctcggcgttccgattcctcccggccacggttgccggattcaagccgtgccgaggccctgggtggacagtcttgtgaacgagaccccgccggccgcgacgggacatgacggccgcgtggccgtcgagatgatcctcggcgcctacaaggcggcgcgtgaaggccgccgggtaacgtttccgttatgaaaggatccatgacgggattgcgggctgtttgtcgtccgcaacgggaagcgttgatgcccgtcatggggaaaaaggcagtatgaaggaattcgatctcgacacgatggtggatgtgggttgcgccacgatcctggaagtgcagcagaagatccagggcatggtgatagacaatccggcccgggcgctggatccggtcattgtcggtgcgcggaaaaaggccgcgttgcgcgtggatgtcttcgcggaggattacaccgaggccgaactgcgcaagaaattgaggaaataccgcccccgcgtgatcggggaagagagtcttttgaaggaggatctcgatctatcgcgcgaggatcgcctggtcgtgctgctcgacatgctcgatggcacggatttgctcgagcggggcttgtccaactggtgttcggcgatggtgttctattatccgcccgaatgcaggattttggcgtcgttcgtcggcattccgaacgatgccgtctactttgcgatcgaggatcgatcggcgccggtgcggaaatttctctggcatgtccgccgcggtcagccgcgcgtcattgacgtgaccggcccgtcgtccgtcacggccttgcaggaagcctcgctgtcgttctacggccagcagcccgccaatttcatgtccgttgcgggaaacaggcgttttgccgcgaaactggctgaattcgaaaccgtcaaggacgactcattcaagcgcatgcgcatctataatttggcgggcaatccgatgatgatgaaactcattgacggatccaaacgcattgacgcggtgttcgatttgctggggcaattgccgcacgacatggcgcccggcgcctacatcgcccgccgcgccggcgcaatcctgtgcggcctcgacgggcggcccattctggaagaagatcttgcgcgcatgttgataaaacccgcgcacggggcatcgaaaaggccgtatctgctggccgccaccgagggattgaaaaacgaatttctcgccctcttcggaacggatgcgtgccgggactgagaagtcccgatcctttttttgcatcaatggcgtgttatgcgccggccgcttcgcgcaaggcccgcaggacggcctgcgcggcgccgggggccggatcgctgagcaccggcaggaaaatcgtccgggccatcgcgcgttcggcattcgggaaatcgccgggacggtagccggcatagccctcgctcgcgcacaagggaccgcgattgcgcgtaaaaatatcgaagcctttggcaaacagcggcaagtcgtgcaggttcggatacggcgaaagcgacgcgcccacgccgcgcgccttgatccgctcgacgtaatccgcggtggacagaccccccatggcctccggctcgtgaatgattgggaatccataaaaaccgccgcgctcggcgccctcgtggaccgtgatggggcgcaatcccggaatcgaatccagtccggcctccacttcggcgaaatacgccgcgcggcgccggttcaattccggcagttttttcaattggaccgccgcgatgccgatgcccaggggatgcgcccggaacttcatgcccagtccgagcggttgaagctccgcatattttgccccgaccaaatcaatgcccgcgatgcggttgacctgtccgacaaggcatgcccgctcgaacacatcgaggtcgtccgtggcgatcatgcccccttcccccgcgctgaccgccttcgatccctgcaaactccatgcgccaacatggccgatcgcgccgcacatgcgccctttgtactttgcgccgtgcgcgtgggaacaatcctcgaccacggcgacgcccgtctcccgcgaaacggccatgatcgcgtccatgtcgcagacgtttccccaaagatgcacggcgcacaggcaacgcgtccgcggtgttattttccgtttcatgtcggccggatcgatcagaagcgtatccggattgatgtcgcagaaaacgggccgcgcgcccagcagcagggccggcgcgatgctgcaaatccaagtattgacgggacaaacgacctcgtcgcccggcccgactcccagtccgaaatacgccgagtacaaggccgatgtgccgttcaccaccgacacggcgaacttcgtgcccatccacgcccgccacgcctgttcgaattcgcgcaccacgggcgttccgcccgaaagctcgtttcgacgaaccatgtcggcggccatcgcggcctcgtcctcgccgatttgccgccaccggtcaagctcgcccgccgcccgcgccgtctgcacgaacgcacgcggaccgcccggattgacttccacgtcgagcgccatgttctttcccgatcgcgtgatgtgaaccgctattttttagcggcgtcttcctttggcacgaccttgtcgaaattgggctccgtgccgtccgttccttcttccatcaaccacatggccgcgtccacgatacttgcctggaacgtcggattttcccaaagatcctcgcgatggccgagggcgctgaaatacaccttgcccttgcccaacgcgctgcaccaaatcaccggatacggcgcaatgcgatacgccgcttgttttgcccctgcctcgcccgggtccagcaacgccagcacatgcatcgtttccgtgttgaaatttttgaacagataccactcctcctcgaaactccaatccgccggaatgctcgccatcgccggatgcgccggatccacaatcttcagcgtgcccttgaactgcgcgccatgcgtgacgaattcggcgcccaccatcttcaaatagggcgtcacctcgccgccggccggcgtgtgaaacgtgtccgacgcggaatgaaagcccatgaaacgcccgccgttccggacccactccaccagttcggcctggcccttttcacccatcggcgcgccgccgtccttgctggggcgcgtcaagtcgccctgcgtgtaaaaacacaccagatcgtagttcttgagattgtccgcattgatcaggctcgcatccttcgtgctggtgaaaggcgacccgttttcccgcgcaagccgcccgagaatcgtttccgccagactcggctgatcgcccttgacggccaccgggctgtgctcgaacccttccgacttgctcaagaacaaaatccgcggcggcgtgatatcctgcgccacggccacgaaagccacacccaagagaaccgctgtcgcccatgccgtccatgcaaccattcgacacatcgtcctttcctcccatgcgttttccatcgcgttgtccaaccggcgtagcataccctcccccgcggcgcgggtcaattcgccgcatttgtagtgtattcctgcacatgaaatttggaacgagcacgcaggtaatggtatatagttcgatatgcgggcaagctgaaggattctaatcgacaataggtttttcagtgcttcagaaaggggttgttgattatgaacgagtataatttgctggatgaatcgtggattcccgtactataccgaaacggctgcttcattcgcatcggcatccgcaaagccctcgaagacgcccaccgcattcgaaccatcgccgcaagcaatcccatggaccgcgtcgcaatccttcggttcctactcgccttgctgtattggtgcaagggcaatccaccggatggagcgaacgcaaacactggcgatccgtttccaacggattggttctcgatgcttgatgccaagagagactgctttaacctcctgggtgaggggaagaggttctatcaatacagaaaggctggttctggctcggaaaagaagcttgccgcaaactatttggcacaagaggtgcccaccggcacgaacaaatggcatttccggcatgcgacggacgagaaggatggcttgtgtcccgcatgctgcgccatgggcttgctgcgactcccactattcgcaacatcagggggacgtggcaagccgccaggcgtcaacgcgaaaccgcctctctatgtcataccggtcggcgattcgctcgcaaagaccttgcggctctcgtggaagccaatgcccaatctgggaacaccggcttgggagaagccggaaatggaacttctaaagacgggggagttgcccttactgatgggattcacttggatcccgcgacgggtctggctagataatcccgacaaacccgaaacaccctgcatatcatgcggtcaggtctgccgattgatccgcctcagcgtcttcgctcctatcggaagcaccaaaacgcaggaaggcggtgtaggtcgcttctggcgcgacccacacgttctctattccacttcagccaatgacgaagtaatctcgctgcatgccgccgacgtgcgcgccgctccggacgccgcagcgggacagtgggcaagaatcatcgctggcaatcagaaagtgcggcaagcagatgatcgaatcgggacttggattgttggtttctcgacagtgaacaacgatacgtatttggaggcgaccgaaagccttgtgcgtgacccattcttacccgaacagtcggaggccatcattgccagactggaacgatggcaaaaggaaggatcaaaacttgcccgcaaggcgcgtcccccgaatgagaaggttgcctcgcgaaagcatgtcgaaatccttccaatgctcgatggggttcgtccacatgtcgaaagcaaggtgttcgcggacgtaggcgagttgcttgtgggagacgatgaagcatgggagcaggcggcggctaagtacaggccaatgatgaggatggtagcccgatcgcttgcgcccggcttcacgaccgaggccctacgccgtcgccggaccatacaattcattgtccccaatatgaaacccaaacctgaaccggtcaagaaagatacccggaagaaagggggcgcgagcgaatgacgcctaccgagatgttcatcaaaaccctgacgaacctcaaaaccggcgacctcagcctcctgcgcacgcacgcaggacaaggtctcgatgagtcgctggaaggattcgacctcttcaccggaatctggtggcccttgcgcgagaagaatcaagctgcaccgcgccgttcagtggcatggctgatcgcgaagctctacgcgttctgtcccatccaccaggagcggggatgcgcgctcgccgcgcaattacgccgttgccgacccagcgaacagttctttaagaagtgtgacaggctgctcctgttgccgaacgaccggttggaaccagctcttcaatgggcaatcggaacccttgcttcaaataaattgcggctcgactgggtgcaactaacggacgatttatccatttgggaacgtgaaacaacccgcctcaggtgggcggaacaattactcgaaaacagggaggagaaatagacatgttgatcgaaatccacgccatccaaaaccacagcccggccaacctgaaccgggacgacctcggcgcacccaagacctgctacttcggcggcgtgctgcggtcgcgcatctccagccagtgcatcaagcgcagtatccgaacaagcgagcagttcaaggccttgtgcggcggaatccgtacccggcagttggcaaaattgattgctgaaaaggtaaccggcaaggccgatgtgaagaagcgcgcggcaaagatcctcaaggaatgcggcatcgctccaaaagacgaagacaagagcgacatgctcgtttacacgacgcaagaggcgatccaggagatggcggcgcttctgcaagatggcgacggaaagaccgatgaacaactggcgcaggccttcggcaacctaatcgctgatcggaccgccgtgcctgatatggcactcagcggcagaatgctcgaaaccggtgtcctgaaagacacgaccgtagaggctgcgttgcaggtaggccacgccatttctacgcacgaggcgcgcccggaagtggactactatgtcgccgccgacgacatccccggcgatgacgcgggagcgggttatgtggacgaagcaatgtttgcgtccgcctgtttctacaagtatttctcgatccactgggagacgctggtcgaaaatctgaagggcaacgaggagttggcggcccacacggtcggcgcattcattcgcgcggcggcattggcgaatccgacaggcaagcagaacagtttcgccgcccacaatccgcccgacgcgctcctcatcgagatcaaagataccccggttagctatgccaacgccttcgccaaaccggccgcgcaaggcgaacgcgacatcatcgcgcagagcattgctcaattggcgcagtacgttcacgacctcgatgtcggatatggccagccgcgacagcgattctggttctctcccaatctccgctataccttgagcgccgtgcaggataagaaggagatcgcactttctgaaaacaaccttcgagcgctcgacgaattgattcctgccgtgattgccgcaatcggccatgactgggaggaagtccagaaggttgtcgcaaaccatgaggtggccccatgagcgctaacaccctctttcttcgcctcgaaggtcccttgcaggcatggggcgatcagcagtcgaaattcgtcatccgccggaccgccgaagcgccgaccaagtccggcgtcatcggtatgctctgcgccgcattgggcgtatcgcgcgccgatgcccccgccgagtggctgccgaagctcggcgcgctgcgcatgggagttcgcatcgatgtgccgggcattcgatggtgggactatcacacggtcggcgcgggcatggaaatgcgcattgccgaagcagagggaaagaccaaacccggcgcgatgctcacgcggcgcgaatacctctgcgacgcgtcttttctcgtcgccctgcaaggcgatcccgctctcgttgccgaactggaagcggccctgaaagcacccaagtggacgctctatcttggacggaaatgctgtccgccctcgcgtcccgtgatgcaacatccatccggttcctttgaagatctccgttccgcgctcgcgtccgtgccatggcaagcccgactcaaaggagatacaccgcctaagtgtgtcgagtgtctcgttgactgggaatccacggaggaacaacctgaagcgcccgacgatgccctcgtctggtacgacgtgccgttgacattcgaaccaccggcacatcgcccacgattcgtcattcgcgagcaattgtccgttggcattgatggcgtcctaagcattgccgagacccccgcacaacggtttacaccgccgccgccgcgtcctcgagccgattatggcaacaaggaatacaaggatcgacgtaaagcccgcctcgaacaagaccaccatctctgcgtcttctgcaagtcgcccgcaaccactgttcagcacgtcacctatcgccgtgccggtggagacgagcagatagacgatctgcgttccctctgccgcctgtgccacgacgccgtcaccatgatcgagtacggccttggcatgggcctcgaccgtatcaaccccgaagaacaacgctggcgaaacaagatcatcgagaaacgcgacgaaatcgtcaaattccgttcgctggagacaaggcggcggcgtctcagcccagaggaggtcgaataatgttcctgtcccatctcttgatcgataccggaggcaatcccgaccgcccaagacccggcaggaaatggctccgcaacgtctatcacgtccatcagcgcctgtgcatggcctttccttcaaacatgcgtgtgcaggacgatccggagttcctcaagcccttcaagggagaagatttcccgttgcgcgggaacgcgaacgcggatccgcgcaatccccggcacagtttcctgttccgcatagacaacggcatcgagagcgatgccccgcgcgccatcatcctcgtccagtccgaactgaaacccaattgggactacgccttccacaacgcgcgcgtctttctcgcggccgacccggaaacccgcgaatacaaccccgcctttaccaccggcgacacgctccgttttcgcatccgaatcaacctaagcaagaagattcagtccaatagagaaggtatcgatcttcgaaaaccgcgagtggggatagacgccaaaggacgtcaaaaagatcaaagcaagcgagtggctctcacatggaacgacgatcagaagccggaagacgtaatcgtgccgtggtttgccgagaaaggcgccaaacgaggctttgaagtgaaaggtgcggcccttcttcaacttggctggtcgtcgggatttacggcggaaaaagaaaaggggatgaaattccggtccgccctgctcgaaggcacgcttgccgtggccaatcccgtgctcttttcccaaacgctggcgtcggggattggcgcggcgaaagccttcggattcggactcttgagcgtcgcgccatgcaatgtgaacccgtgacatgcgcacacacgatctgcacgaattgccgaaagtgagagacaaactcggttatctgtacgtcgagcattgtcgcatcgatcaggaagacaaggcgatcgctttgcatgatgaaaccggcgttacctccgttccatgtgcggccctttccctgctcatgctcggacccggcaccagcattacccatgcggccatactcacgctggccgacagtgcctgtcttaccgcatggtgcggcgagcaaggcatccgatactatgcctccggctccggggcgacccgcgacgcgtatgccctgctccggcaagccgccctttgttccgatgatgccgcccggctgaaagtcgtccgaagactttacgaggcccggttcaaagggaaaatcgacccctccctgacgcttcagcaactccgtgggcgtgaaggcgttcgcgttcgcgacgcctatgcccatgccgcgcgggaaacggggattcaatggcaagggcgaaactacgatcgcggcaactggaacgccgccgatcccgtcaatcgagcgctttccgccgccaatgcctgtctctacggtatctgccaggccgccatcattgccgccggttactccacggcgctcggttttatccacacgggaaagcaactttcctttgtttacgacattgccgatctttacaaatgcgacatgaccgttccactcgcttttcatgtcgcggccggccatcccatcaacttggagcgggaagtccgaatacaatgccgcgacgtgttcgcggaacaacgccttcttcaacggatcgttgacgatatcgcccagatcctcgatatcccacctgacgaagatacgcgtttggatgaggatccggccctgcccggcgcactctgggatccccggcaaggatcatgtccgggcggcatacaatacggtgctgatgactccggagatattggacatggtgatcatgattcttgaatccgtctcgccatcccttcgtggacaactcacgcggtggctgctcgaaccaaaatcaggcgtctttgtcggatccatttcggccatggtccgccaaaaactttgggaaaaggtttgcaaggaagcacgagatggcggcgccatcctcatcttttccgccaagaacgaacaaggtttcagaatagacttctggggaaaaacaacccgatggattacaaattgggaaggacttcaactagttaccaaaccaaaatgccaataaattcaatgggtattccccacgcacgtgggggtgaaccggatcgcaagaatgaggcggcgcagcaccgaatgtattccccacgcacgtgggggtgaaccggcggagatggtaagggagaaaataaaagaggggtattccccacgcacgtgggggtgaaccgagcaatgccgcgtatgaacaggccgcgcacaagtattccccacgcacgtgggggtgaaccgatccgccggtggccgcgccaagcgcgaatccggtattccccacgcacgtgggggtgaaccaagccgcccgactgatcgccgaggcgcgggcgcgtattccccacgcacgtgggggtgaaccgatttttgggatgctgttggtgccaaagtagtagtattccccacgcacgtgggggtgaaccgacgtattataactcgcccgcgggccgaggtacgtattccccacgcacgtgggggtgaaccagatgcaaaagagatggcggcgactaccacggcgtattccccacgcacgtgggggtgaaccgtatgtctcggaagaacagaaaacggccatagcgtattccccacgcacgtgggggtgaaccgaccgcgagtacattgaagaacatgccacagaagtattccccacgcacgtgggggtgaaccgtaacaaataaagcgtaaagagaaagcaaatacgtattccccacgcacgtgggggtgaaccggttcttgctgttgaagtgtgtggaacggtgacgtattccccacgcacgtgggggtgaaccgtttccatgatcttttcataatcgggatcttttgtattccccacgcacgtgggggtgaaccgagcattgaggtttcgccgcaaagcggcgaaacgtattccccacgcacgtgggggtgaaccgatcgaatcagggaaatgacacacacagatgatgtattccccacgcacgtgggggtgaaccgtcaacctcacgcgcatataacaggatccgcacgtattccccacgcacgtgggggtgaaccggaattggcgcgcagaataatgcggtccaatcggtattccccacgcacgtgggggtgaaccgtcaatccccgcgcgcatgcggggcttttacctgttggagccgcgagccgcaaaggcgcaaattttttggtgttattccctttttcatgatagtcctgaattttcgaacgttgttacaggcagccattactgaaaaaagttgttttttccggttgaatgggttacagaatcgttttgaggcattgaaggcggagtttcaccgggagccgaaatcggggcaagtgtgtgggacaggctgtccagcctgtccgtccacggacagggtgtgggttcggaagcggcaaggatgctgtgtttaccgtagaagcggcctgttgccgcttttccgtttgttggagggcgtgcgatttcgtcatgtggcgtcgaattccgattgggcccacagggtatgcgcaatcgggtgtggcaggaaaagcggagcaatgaatgggcgcgcctcccggaaaaaataaaggacgcctcactgggaggcgcccagggcatcccgtaggatggcgcccgcggatcgaaagatccttactatgatttgaaggtcaatcgccgctcaggtatactaaactatattataaacattccttccgggaatgtcaagtttttggttttcgggtgttgttcagatggggaggcctgtcatgaaaaaggcaaatgaatcgctggtgctgggactggaccttggaaccaactcgatcggctgggcgctgttcggatttgacggcgataatcccgtccgccttgtcggcatgggatcgcgcattttcgaggccggaaccgagggcgatatcgaggcgggaaaagacgaatcacgcggcgtggcacgccgaatggcgaggcaaatccgccggcagggcgaacggcgtgcaaggcggcaatccaaggtgggccgtgtgctgcaagccatgggactcctgcccgaaggggatatcgatcattcacaagcccgtcacgaatatttcgtgacactcgaccggacattgcgtgcccgccacaagaaggttaatttggaagcactgccgcatgtctttccgtattggctgagagcccgcgcactggacaatccactcgaacgggacgaactcggacgggccttctaccatctcggacaacggcgcggatttttaagcaaccgcaaggcctccggaaagaaggatgaggaaaagagcgtcgtgaaacagggcatcgccgaattggccgcggcaatacatgaaaccggcgcgcgcaccctcggcgaatacctcagccgtatagacccttcggatcccgaacagcgccgcatccgcgaacgctggaccgcccgccaaatgtacgaagacgaattcaacgccatttgggacgcccaatcgaaacatcatcccgaagtgcttacaccggaatggcggaaaatccttcataacgccctcttccggcagcgaccactcaaactccagcacgatctgatcggggcatgtccgcttgaaccggatcgcaaacgggcgcccatggccctgcccgccgcccagcgatttcgtgtacttcaaaaggtcaatgacctccgcgtcatcgcgcccgactattccgaacgcccgctcaatcccgaagaacgcaccctactgctcgacgccctcgaccgccaagaggaaatgaccttcggcaagctccgcaaactgctgaacctcaaagcgtacgtcttcaatctcgaaaacggcggcgaagaaaagctcattggcaatcgcacatccgccaagatgtacggcattttcggcgaacgctggttccggttcacgcccgcccaacgcgaggccgtcattcaagacatccgttgtttcgaaaaagacgccgcccttgctaagcgcgggcgcgagcactacggactcgatgaagagacggcaaaacgtttcggggaaatcgaactcgaagacgggtattgttcgctctcccggcaagctatcgaaaagctcttgccgctcatggagaaggggatcgcctataagacggccgaaaaagaagtctatggcgatccgggaccggccatcgctgtcgaaatgcttccgagtgtggccgaggccgtccgccagcaactcatgcccgtcctgcgcaatcccgtcgtcaatcgtgttctgaccgaactgcgcaaagtggtcaatgcgatcatcaacaagtacggcaagccggacaagattcggatcgaaatcgcgcgcgacatgaaaaaaccacggcaggagcgcatgaaaatcagccgaaaaatgcgggacaacgaaaaatcccggcaaaaggcggccaagcgcatttttgaggaaataggcgtgcagaatccctcccgcgacgatatcgaaaaggttctgctggccgaggaatgcgaatggcgatgcccctataccggcaagacaatcagcatgcgcaccctgttgggcgatgcgccgcaattcgatgttgaacacatcatcccgttcagccggtgcttggacaattccttcaacaacaagacgctctgctaccacgaggagaaccggagcgtcaaacgcaatcgcacaccgcacgaggcctatggcggcgatcccgcacgctatcaggagatcctcgatcgtgtcgctaaattcaagggtgaaggccgcgatgccaaactccgccgcttccagatggcggacctcgaggatttcgaggatttttccacccgcatgctcaacgacacccgctacgcctcgacgctggccgcgaaatatctcggactgctctacggcgccgagtaccgaaaacacatccaagtcagcaccggcgtcatcaccaagtacctgcgcgactgctgggggctcaacaaggtcctcggcgacggcggcgagaagaaccgcgaagatcaccgccaccacgccgtggacgccgtcgccatcgcgctgaccagcccgaaaaccgtcaagatgctcagcgacgccgccaagcacgccaccgaggaacgccgccgccagttcggaaaggtcccgcctccgtgggaccgtttccttcaggacattcaggaagccgccggtcaaatcgtcgtttcgcaccgcgtcgcacgcaaagtcaacggccgcatgcacgaggatacattctacagcccgcaaccctcttccgatccggccaaaccgtgcgtccatgtccgtaaacgcgtcgaggcactgtccaagggagaaatcgaggccatcgttgatcccatcgtgcggcgacaggtcaaacaacggctcgacgaactggacagcgacgatcccaagaaggcattcgccacagccgaaaaacatcccttcatcgaaaccggcgatggacgccgcctgcccattcacaaggtccgcatccgcaagaatgccgccacattcaagatcggcaaagagcatcgggtgcgccatgtcaccaccgattccaatcatcatgtcgaaatcatcgaaacgacggacaagcgcggaaatgtgaagtgggagggatccgttgtaagccggtacgaagccatgcgacgactccaaaaccgcgaacctgtcatcaagcgtgatcacggcaacggaagaaagttcctcttttcgctggcgttgaatgaagtcgtgcagatgaaggacacggaaggcgttgtacggcaatacagggtagcaggtgtgtcacagttctcaaccggccaaatagtaattgatgtccgcgagcttagcgatgcgcgtcgtgcggttgatgttcctcgtgaaggacgtacccgttcgccggacacgctccgtaagtctgaatctatcaagttttgcgcaaccccccttggggagcttcgtcgggcgaatgattgagcggatcatagacttgagcacggatgccgtccggctgtccgtgaacatggagcggctgctgatcgagcggcacaattccgattcgatcacgatgtccgccgagccggttacggttccgctagacgaggtggcggccgtcgtggcgtcgcaccggcaggtcgtcttcacgcagcctgcgctagcggggattgccgcgcatggcggggcggtcgtcgtgtgcgacggcaagatgatgccggtcggcatgatgctgcccatcgaacagcatcatctccaggccgaacggttcgtcaagcaagccgaagcggcgcttcccgtcaagaaacagatctggcgtcagattgtccaggcgaaaatcgccgcgcaggggcgcacgctcctcgacttccgcaagagcgatttcggatttttcgagatggccaaacgcgtcaagtcgggcgacacggacaatatcgaagcccacgccgcgcggcgctactggccgctgttgttcgacgatccggcattcaagcgcgaacgggaagcgccggaccagaaccgctttctcaactatggctacacggtcctgcgcgcgatggttgcccgcgcgatttgcgccaccggcctccacccatcccttggcgtccatcatcacaaccgctacgacgcgttttgtctcgccgacgaccttatggaacccttccggcccgtcgtggaccgcgccgtcgtccatatcgtctattcgcgcggcaaggaagcgcccatggacaaggaaaccaaggccgcactaatcggcgcggtgaccgggcgctatcggctcgatggtgagtctcgcaccctgttcgatattctttcccgcaccgccgcgtcgctggcgaaaatctttaccggcgaaggcaaggaactcgccttgccggtgatttaggtgattcaccacgaaggacacgaaggacacgaagaagaagtcggagttgatagacaaagttgaacattgtgcggtaggatttttttgctgcaagaggaccgcgcatgcacgaattgccggatgcgcggaagacatggaaatgaaagcaatttcgtgggccgagccgtcgtcttgattggtttcttgttccttctcttccggttcgtcttcgtgcttttcgtgttcttcgtggtgaagataccaatcaaccgaaacaaggagatgacaccatggaattcgatgccctgagcaatcgggtcatcggctgcgccatcgaggcacaccgcgaactcggtcccggcctgctcgaatccacctatgaaaaatgtctcgcatatgaactgtccacgcatggcatgaccgtggccacgcaggtcgaattgcccgtacgctacaagggggtcctcctcgattgcggctatcgcatagacgtgctggttgatgaccagatcatcatcgaagtcaagtccgtggacaaagtgattccgattcacgaggcccaattgctgacctatctcaagctcgcaaagaagcgcatcggactgctcatgaatttcaacacggtccgattgaaagacggtatccgccgatttgtaatgtgaagattcaccacgaagagcacgaagggcacgaagaaagaaagagaatgccgggtggtaaatggataacaatagggttggtggtgttttgtggttgaaaaagtcggttgtgtgtgtctgaaacttgaaaaatacaatgaatatgcacactctaatttatctggacctcctaccgcctgccgatagattgtttttctgtccttcttcgtgtttttcgttttcttcgtggtgaggataccaatcaactgaaacaaggagatgacatcatggaattcgatttgtgctgtgaagattcaccacgaagagcacgaagagcacgaagaaagaaaaagaatgccgggtggtaaatggataacaatagggttggtggtgttttgtggttgaaaaagtcggttgtgtgtgtctgaaacttgaaaaatacaatgaatatgcacactctaatttatctggacctcct

SEQ ID NO: 945 - DNA, 103367 bp, Artificial Sequence
  Synthetic Oligonucleotide
cggcgttgctgtcgaaacgcacataggaaccgtcgctgcggcggatgggccggcgggtgcgcaccacgacggcatcggccacctggccctttttgatggtgccgtccggagcagcttccttgatgtgcaccttgatgacatcgcccacgcgggcatacatctggttccggccgagcacaccaatggcggcggcgcgtttggcgccggtgttgtcggccacgtcgagaatggaacggacttgcagcataggtcaggagagtttcaggcggccgcgccggcggcgcgttcaatgatttccaccagccgccagcgtttgaggcggctcagcggacgggtttcctcaatgcgcacaacatcgccgggcttggcctcggacttttcgtcgtgcgcgtaatactttttgtaactccgcacaatcttcttgaagcgggggtgtggaaaacggcgctccacccggacgacgatggtcttggccatcttgttggaaaccacctcgccggtgcgctctttgcgacggcgggcggtgacgggggcggaaggggttgcagtggtgtcagccatagtctaaaaaatcatgcctggtttttcttgcgagcggtgatggcggtctccacgcgcgcgatgtcgcgccgcagcaaacgcatgcgcaccggattctccagccggctgccggccttctggagccggaggttgaagagttcctgtcgcaggtcgcggctcttggcctgcagctccaccagggtcaaatctttcaattcactcattttcatggcatcaatgacggtggcgggagatgaattttgtgtgaatgggcagtttggtggcggccaggcgcatggcttcgcgagccacgatttcaggcacaccatcaacttcgaaaagaacacgggcaggtttgatgacggccacccacgattccagcgggcccttgcctttgcccattcgggtttccaacggtttcttggtgtaggacttgtcagggaaaatgcgaatccacagtttgccgcgccgtttcatgaaacggctgatggccacgcgggcggcttccagttgtttggtgtccagccagcagcgctccaaggcctgcaggccgtactcaccaaacgcgacggtgttgccgcgggtggccaggccggcgcggctgccgcggtgcatcttccggtatttaacgcgtgcaggttgtaaaggcataaaacagtctcaggttaacgggcggcggcccggtcatttttggcggtttcaggcttgttttcgccgcggcaaatccagcatttgattcccaacttgccgtaaagggtgtgagcctcggcaaaaccgtagtcaatgttggcgcgcagagtgtgcagtggcacgcggccttccagatattgttccacacgcgccaattcggcgccacccaaacggcccgagcaacggatgcggatgccctcggccccctgttccatggcggtctgcacagcccgtttcatcgcgcgccggaaagagacccggcgctccagttgcagggccacgccctcggccaccagttgggcgtcgaggtccgggcttttgacttcctgaatctcaacgtaaatttccttgccggtctttttgctcagctcttctttgagcttgtcaatttcagtgcccttgcgcccgatgaccacaccgggccgggcggtgaacaaggtgatgcggcagcggttgccggcgcgctcaatttgaatcttgggcaccgcggcatccttgagtttctccttcaagtaccggcgcaattggaagtcttccaccagcagccgcccgaagtccttcttctcggcataccacttggagcgccagtcacggttgacggcgacacgcagaccgatgggattggttttttgacccataatgattagttggctccgtcggaaagtacgattttaatgtggctgttgcgtttgatgatggggccggccatgccgcgcgccttgggggtgtagcgcttgagacggctggcggtcagggcgacggcctgggccaccacgagtttggcggcctgcaattgatggttgttctccgcattggcaatcgcggaatcaagcgtccgcgccaccagccgggccgacttgcgcggcaccacggccagaacggcacgggcttccagggcggacaatccctggatttgacgggtgacttcccgcactttttgcggggacatccggacattgcgggtaatcgcctgtacttgcatagcttacttggcctcggctttggcggtgtgagcgccgtgtttcttgaagatgcgcgtgggagaaaattctcccagccggtgccccaccatgttttccgttacaaaaaccgggtggaacaccttgccgttatgcacgttgaaggtcaagcccacaaaatcgggcgtgatcatggaacggcgcgaccaagtcttgatcggggctttggacttggactccttggccgccaggatcttcttcatcaacgaggggtccacaaacggaccttttttaatcgatcgtcccataggctttcagatcaaagcagtttatttgcgtttcatgggccggccatcgcgccgaaccacaataaagcggttggaaggtttgtgtttgttccgtgtgcggtagcccttggccagcaatccccaaggcgatgtcaattgttgccagccgccaccacccttgctctttccggcgccaccgccgttggggtgatccaccgggttgcgcgccacaccgcggttgaccggccgatacccgaaataccgcgtgcgcccagccttgccccaaacaatgttttcatgatcggcattgcccacctcgccaatggtcgcatagcagttttcgtgaacgcgccggatttcaccggacggcaaccgcaaggtggcatagccttgatcgcgggacatcaaggtggcggagctgcccgccgagcgcaccatctgcgccccacgaccgggcaccatctcaatgttatggatggccatgccgatgggaatgtttttgagcggcaaatgattgcccacttccaccggagcctcaggcccgctggaaaccttggcacccaccttgagatccttgggcgccaaaatgtaagacttggcaccatccggatacttgatcagcgcgatgcgggcggagcggcaaggatcgtattcgatggcctccacagtggccacctggccatgacgccggcgcttgaaatccaccagacgaattttttgcttgtggccgccgccaatgccgcgtgcggtgacgcgcccgtagcagttgcgcccgccagtctttttgcgggtcaccaccaggctcttctccggctccaccttggtgatctcgctgaagtcggccaccgtgatgtagcggcgcgacggcgtcaaaggtctaaatgttttaacaggcataaggcaaatgtaggttaggtgaggttgatgcggtcgccttccttcaacgtgacaatggccttcttccaatcactggtcatgccggcctggggtgtgcgttgacggcgcaatttgccgcgcatgttcagcgtgttgacggcaaccaccttgaccttgaacaactcctccaccgctttgcgaatctgggctttgttggcccgggggtccgccaccacggtgtattggttgtgcttctcggcctgcagggtgcccttctcggtcacgcggacggtcttgatgatttcaaaggcattcatggtgtcaggattggctgaggcgctgtcccacctgcgccagagcagcgcgtgtaaaaacgattttggccggtttgagggcctggtaacaattcaagtctgcgccggtgaccagttccacatacggcaggttgcgggcagccaggcgaaggttctggtcaatggtgtcggtcaccaccagcacggtctggccgggagccagagtgtccagcaaccgcaccagctcgcgcgtcttgggctgggccagtttcaattcttccaccacgatgacttcactggccttgatgcgctcgctcaaagccttgcgcagggccaggcgccgggtggagtcattgacttttttgctgaagtcgcgtggcttgggaccaaagaccacaccaccaccacgccacaagggcgactgaaacgaaccggcgcgggcgcggccagtgcctttttggcgccagggtttcttgccggtgccggccacttcacccatggtcttggtgcaggcagtgccggagcggcgggcggccaggtgggccaccaccacatcgtgcacagcctgcgtgcccttgccgttttcaataatcgggaaagggacttccacttcgccctgcggcgaaccttgcaaatcttgtacggtgagcttcatgacgggtctcctcacttcttggcggccttggctttaccgcccttggccatggccttgtgtttctcgatgcgctcctggcgggccttctccaacacgcgggagcgcttcttggactcgcgaatgatgacgtagtccccctcggccccgggcatcgagcccttgatgagcaaaagattttcagcttcgcgcacctggatgatttgcaggttttgcacagtgcgccgcacctgtcccatgtggccgggcatcttcatgccgcggttaacggtgccggggaacaaacggcagccaatggcgccgctccgacggtgccagcccttggcgccgtggctcatgtcgcccccgcgaaaatgatgccgcttgaccacgccctcaaaaccacggcctttggtcacgccgatggcatccacgtagtcaccggcccggaagatgttcactcccaaggtgtcgcccggtttgacctccagttcaaagtcgcgaaattcgcggatgatccgaacgggcgagccgttgtgctttttgacgtggccctgcagcggcttggtgaggcgggactccttctgctcgccaaagcccagctgcacggccttgtagccgtcgcgttcgtgggtcttgcattgcagcacgcggttggggccggcctgcacaatggtcaccggcacgacgacaccgttggcgtcgtaaacgcgggcgtgccccagttttttgccaagcaaaccaatcatagagacttagattttaatggtgatgtcaacccccgccgggagggtgagttttttgagctcgtccacggtcttggcggtcggttcaatgatgtcaatcaaccgcttgtgggtgcgttgttcaaaggtttcctgggacttcttgtcggcatgcggcgagcgcagcaccgtgaaccgctcgatgcgggtgggcagaggaaccggcccggccacgcgggcgccggtgcgcttcaccgtttcgacaatttcgtgcgccgaggagtccacgatccgataatcgtagcctttgaggcgaatccgtatgcgttgtccaggcatataaagaacaagttaagagtttctgttttacgtccgggctgcaggcttgtttttggcctgatccaaaagttgagcggcaatgctgctcggcacctgctcgaaagtgagcggttccatcgagtaggaggcgcggcccttggaaaggctccgcaccgccgtggcatagccgaacatctccgccagcggcacgcgggccgtcaagacggtggccccgttgcgcacttcgatgtgctccacgtgaccgcggcggcggttgatgtcacctaaaatatcaccctgatactcgtcgggggtggtcacctcgactttcatcacgggctccaaaagaatgggattggccttccggaaagcctctttgagcgcaaagatgcccgccatcttgaacgccaactcgctcgagtccacttcgtggaaggtgccgtccacaatcgccaccttgatgtcaataatctggtaaccggcataaacaccggtgcggacggcttcctcaatgccgctgataaccgccggaatgtattccttgggaatggcgccaccaacaatcttgctctcgatttccacacccttgccgcgctcattcggctcgatgtggatgatggcgtggccatattggccgcgcccgcctgattgccggatgaatttgccctcgccctcggccttggtggtgatggtttcccggtaggcaatctgcggcgccccggcattggcctgcacattgaactcccgataaaggcggtcccgaatgatttccaggtgcagctcgcccatgccggcgatgatgagctgaccggtctcttgattcgtgaaaacccggaaagtgggatcttcctcggccaaccgttgcagcccctcggtcaatttgtcgcgatcgcccttggtcttgggctctatggccatgctgatgaccggttcggggaacgtgggcggctccagcagcacactgaaatcttcgtcgcacaacgtgtcgccggtggtgatgttgcgcaggcccaccagcgccgcaatgtcgccggagaaaacctgctccacgtccaggcgcttgtcggcctgaatcatcatcaaccggttgacgcgctcacggcggcgtgtgcgaggattgtaaatgatgtcgcctttcttcaacgtgccgctgtacacgcggaagaacaccagcttacccgcgtaggcatcggtccacagcttgaatgccagcgcgcaaaactgcgcgttgtcatccgccgccaccatcaatggagtgtggtcgtcgggattctcaccttgagcgggcggcacatccagcggactgggcagataatccacaatggcatccaccaagggttgcacgccgcgcttgcggaatgcgctgccgcagagcaccggcaccagctccaaattgcaggtcagtcgccggatggcagctttcagggtcagagcgtcaatcggtttttcctcgatgaccagctcggcaatggtgtcgtccttgttgctgacggcgtcaatcaattcagccagggcggcggcagcacgctcgcgcagttcagccgggatgtcggtgatggtgaagcggacacccagatcatcctcaggatcgtaaatgatggccttttgattgacgacatcaatgacgccccgcagatggtcctccttgccgatgggcagcacgaccgggtaggcgtaagcgccgagcttgcggcggaggtcgttcagcgcgttttcaaaattcgcgccggtccggtccatcttgttgatgaaggcaatccgtggaacgcgatacttgctggcctggcgccagaccgtctcggattgcggttggacaccggccactccacaaaacacagccacggcaccgtcaagcacccgcatcgagcgctccacttcggcggtgaaatccacatggcccggagtgtcaataatgttgatgcggaattcctggccggcaaaaagcttggcgcaaccgtcttccttgggtttccagtaacaggtggtggcggcggaggtgatggtgatgccccgctcccgctcctgctccatccagtccgtcaccgtgttgccatcatccacatcgcccatccggtgaatgaggccggtgtagtaaagaatgcgctcggtggtcgtggtcttgccggcgtcaatgtgcgcggcaataccaatattgcgcgtccgggccagtggataaggccggttcggcgcatcgagcactttcttttccgtcgcagtttccatgcaaaatttttaccgtatcagacaataaaaacgccccgattttcagcgcagccgacggggcgtcccagtgagcaccactaccagcggaaatgggcaaaggccttgttggcctgcgccatccggtggacctcgtcgcgtttacgaatggcgttgccctgcccctggtaggcatccataatctcggcagccagggcctcgcgcatcgccacacccttgcgggcatcggcgaaatccaccatccaacgcatcgccagagaaatctggcggtcgggcggaacttccaagggcacctgataggtggcacccccgacgcggcgggccttggtctcaatgcgcggcttggcattgtccaccgcgcgctggaggacctccagtggattgatttgcgggttcttggccaccaattggtcaaaagccccgtaaacaatccgctgggccgtgctcttcttgccccatttcatcacagtgttgatcaagcgggtgaccaacacgctgtggtacttcggatcttcggccatcggccggcggacagcttgacgtcgtcgagacataattccaaaaatcctcaggatttcgccggagcggctttcggccgcttgaccccgtacttggagcggctcacgcggcgtttctccacgccggccgcatccaaggttccacgcacgatgtgataacgcacgccgggcaaatctttaacacggccaccgcgcaccagcacgatggagtgttcctgcaggttgtggccctcatccgggatgtaggcaatgacctcatacccgttggtgagccgcaccttggccaccttgcgcatcgccgagttcggtttcttcggcgtacgcgtcatgacctgaatgcagacgccgcgccggaacggcgcgccctccagggccggcgccttcgacttggtggcgacctttcggcgtccaaaacggacgagctgattaatcgtcggcattattgtaaattccgtgttgtgctttcttcaacgtccttccccgggagaggaaaggagcgcggatattagcaaagcattttcaggttgcaacaagtatttcaaaaaaatttttttcttgacaacttattctccatttccggagtcctccgcagccgcttccccggccggagcttcgcctgccgcggcagccggctccgccggcgcaggctccagctccaccagcggcttgagctgcacattccgatgcgccggataacccgtgcccgcaggaatgatgtgccccatgatgacgttttccttgaacccgcgcaggtagtccacacgcgaagtcgtggccgcctcggtgagcacccgcgtcgtgtcctggaatgacgccgcgctgaggaaactctccgtttcgagcgaagccttcgtgatgcccagcagcaccggctggcactccgcaggtttgccgcccagtttctccacccgctggttttcctcttcgtgctccagcttgtccacctgctcgccccacaggaagcgggtgtcgcccggctcagtgatgcgcaccttgcgcagcatctggcgcacgatgatttcaatgtgcttgtcgttgatggtgacgccctgcaggcggtacacctcctgcacttcgttgacgagatgctcctgcaactgctgcgcgccgcagacctcgagaatttcgtgcgggtcaatcggtccttccgtcaactgctggccgcgcttgaccatgtcgcccttgaacacgatgacgtgcatgccgatggggatgaggtgctcctccttctggccggtcatcggatcggtgatgatgatgcaccgcttgccgcgcaccgtcggaccaaagtccaccacgccgtcaatcttcgaaatttcggccgcatccttcggccgccgcgcctcaaacaactcggccacacgcggcagaccgccggtgatgtccttggtcttgctcaccttgcgcggggtcttggccagcaacgcgccagcctcgatgatgtcgccttcctccaccacgatgtgcgcgcccgaaggaatgccgtagctggcaatcacatcgcgaccgtcttcatccaaaatgatgatttgcggatgcaaatcttccttgtggtcaatgataaccttggcctgctgcccggtcgcctcgtcctcctcctgcttcatcgtcacaccttcaatgatgtcgtggaagcggatgcggccggctttttccgaaatgatgggcacgttgtacggatcccattgcacgaaggcctcgcccttcttcacccgcccgccatcggggacggaaatgaccgagccgatgaccagtgtgtgactctccagctcgcgcccatcctcgtcctgaacgatgatgctgccgtttttgttcagcacgatatggttgccgtcctgcagcggcacacaacgcagatcattgtacttgatgataccgtcgtgtttggccttgatttgcggctgcttgaacacctgcgacgccgtgccaccgatgtggaacgtacgcatcgtcaattgcgtgcccggctcgccgatggactgcgcggcgatgatgcccacagcctcgcccagcttgaccatctgtccggtcgccaggttccgtccgtagcagcggatgcagacgccgtgtttgctctcgcaagtcagcaccgagcgaatcttcacgcgctcaatgccggcgtcttcaatctggcgcgccttgtcctcgtcaatctcttcattcgcagccacgaggacccgtttgggatcgcgcgggtcgtaaatgtcatcgcacgcgcaacggcccaccaggcggtcacgcagtttgacgatttcatcttcgccctccaggatggcctgcacccagatgccgttgaccgtcccgcagtcttcttctcgcacgatgacatcctgcgccacgtccaccagcttgcgcgtcatgtagccggagtcggccgtcttgagcgccgtgtccgccaaacctttgcgcgcgccgtgagtcgaaatgaagtactccaacaccgtcagcccttcgcggaagttcgagagaatgggcttctcgatgatgtcgccgctcggcttggccatcaaaccgcgcagaccggccaactgacgcacctgttgcttgttgccacgggcgccggagttgaccatgaggaagatgggattgtactcggacttgttccggttgcgctccaaggtctgaagcatgaccgttgaaatctggtccgtgcaatgcgtccagatgtccacaatcttgttgtagcgctcgccgtcggtgatcacacccttccggtactgtttctccacctccgctatctgcttctgcgcctcgcggatttgcttctccttttcctccggaatgatcatgtcctcgatgccgatggacacaccggcccgcgtggcctcgcggaagcccagctccttgagccggtccaaagtggcaatcgtctcctcatgcccgcaatacttgtagcaattccaaatcaaatcgcccaattcgttcttgccggccaccttgttgaaaaagcccagcttctcaggccacacttcgctgaagatgacccggcccacagtggtctcaatcaccgcactcttcggatcgccatacaccgtctgacgcccgcggtcgggattggccagccgcacccggctgtgcgtcttcaattcaccctcgcgataagcgaagatgacctcctccttggaaccaaacagcatcaggcgctgattgcctttgggctggcgtggctccgcggtgaggtagaagcaacccagcgtgatgtcttgcgtcggcgtcataatcggccggccgctcgacgggctgaaaatgttgttgggcgccatcatcaacaggcgcgcctccatctgggcctcgatggacagcggcacgtgcacggccatctggtcgccgtcgaagtcggcgttgtacgccgtgcagaccagcggatgaatccgtatggcctcaccttcgatgagcatcggctcaaaggcctgaatggacagccggtgcagcgtcggcgcgcggttgagcaacaccgggtggcccttggtgacttcttcaagaatgtcccacacctcggtggactggcgctcaatcaatttcttggccgagcgcaccgtgtgcacatagcccaattccttgagccgccggatgatgaacggctcaaacagcaccagcgccatcttcttgggcaaaccgcactgatgcagcttcagctccggcccaatcacaatcaccgagcgaccgctgtagtccacgcgcttgcccagcaggttttgacggaaccgcccgctcttgcccttgagcatgtcgctcagcgacttgagcggccggttgccggcaccggtgaccgcgcggccatgacgcccgttgtcaaacaaggcatccaccgcctcctgcaacatgcgcttctcgttccggatgatgacctccggcgtcttgagctgaagcaggttcttgagacggttgttgcggttgatgacacgccggtacaaatcattcaaatcggaagttgcaaaccgcccgccctccaacggcaccaacggccgcaaatccggcggaatcaccggcagtaccgtgagaatcatccactccggcttgacgcggttttccacaaacgcaccaagcaaacggatccgcttggccagtttcttgcggatttgcttgctcttggtctcctgcatctgctgctgcagcttttcaatctggcgcggcagattgacgttggccagcgcctcacgcacggcctcggcgcccatcttggccacaaaggcatccggcccgtaagtctcgcgagcttcgcgatactcatgctcgctgagcagttggtggagttgcagcggcgtgttgcccgggtccaccaccatgtaatcctcgtaataaatcacccgctccaagtcccgcgccgtcatgtccagcaccaagccgatgcgcgagggcatgcacttgaaaaaccagatgtgcgataccggcaccgccagctcgatgtggcccatgcgttcgcgccgcacccgcgccaacgtcacttccacaccgcaacgatcgcacaccaccccgcggtgtttaatccgtttgtacttgccgcaggaacactcccagtccttcacaggaccgaaaatgcgctcgcaaaacaggccgccacgttcaggtttgaacgtgcggtaattgatggtctcggggttttttacctccccttttgaccaggaacggatggcctccggtgaggcaaccgagatggcgacgtaatccacctggttgaccttgtccagtccgagcagctcgcgtgctgtttctttcgtattcatgttggctgtggcattggtggggcggaaaaatcccgccccgggtctgcaaagttcaattacaagttggccagggcgctggccggcgtggccggttgatgttcaatgggattggtgtaccccaccttcacgtccagccccagggactgcatttccttgaccagcacgttgaaagattcagggatgccggcctccaaacaattgtcgcccttgacaatgctctcgtagatacgggtgcggccctgcacatcgtccgacttgacggtgagcagctcctgcaacgcataggcggcgccatacgcttccatggcccaaacttccatttccccgaagcgctgaccgccgtactgtgccttgccgcccagcggctgctgggtgaccagcgagtagggacccaccgcgcgggcatggattttgtccgccaccaggtggcccagtttcatcatgtagatgtagcccaccaccacttcctgatcgaacggctcgcccgtccgcccgtcgaacagacgcgccttgccgttgggcaatagcccctgctccttgcccacgggcgtttgcgccgcctgtttgatgaactcccaaatgtctttctccttgatgccgtcgaagaccggcgtcgcaaatttcaatcccagcagcttcgcagcgtaccccaggtgcgtttccaacacctgacccacattcatgcgcgacggcacacccagcggattgagcacaatgtccaccggcgtgccatcggccaggaacggcatgtcttcctccggcacaatcttggccacaacacccttgttgccatggcgtccggccatcttgtcgcccaccgacagtttccgcttcgaggcgatgtacaccttcaccatcttgatgatgccggcgtcaatttcatcacccgcctccacgcgctccatctcctgatcgtgctgggcctgcaaatcatcaaacttctttttgaagccgccgatgatctcattgatcttgttgcggatgggcgaaggatcaatctcgatccggtcatacacctgcgccagcttccgcaacaacgtcttggtaatcttgcgattcgccggaatgatgatttcaccggtctcgctgttcaccacgtccagcggaattttctcgcccagcaagatattgctcagagcctcggtcagttgctcccgcagctcttccatcttggtgcggtattcctcctgcacctgtttggcggcacgacgcgcaccgcccgtctccgcctgcacctctttttccccttccttctccttcttggcggagaccttgacatccatcacaatgccataagtcccgctcggtactttgagagaggtgtccttcacatcggcggccttttcaccgaagatggcccgcaacagccgctcctcgggcgccagctccgtctcgctcttgggcgtgatcttgcccaccaaaatgtctccgggcttcacctccgcgccaacgcggatgacaccgtccggccccaggttcttgagggcttcctcgccaagattgggaatgtcacgggtgatttcctccggacccagcttggtgtcgcgcgcgctcacctcaaactcgtcaatatggatggaggtgaaaatatcctccttgacgatgcgctcgctgatgaggatggcgtcctcgaaattgtaaccgttccacggcatgaaggccaccaacacgtttcgtcccaaggccagttcaccctgagccgtgcagggaccatcggcaataacctgccctttcttgaccgtgtcacccttgttcaccagcgctttttggttgatgcacgtggcggcgttggagcgcatgaatttgcgcagtccatacacgtacacgccattggccggatcgtgtttgatcttgcgcttgccctccggcagcttgccatccgcagtgatgatgatttggttgcccgtcacgctggccaccttgccgctctcctctgccaccaacacagcgcgggaatcccgggccacacgctcctccaaaccggtggccaccagtggcgtctcggtcaccagcaacggcaccgcctgccgttgcatgtttgaacccatcagcgcccggttggcgtcgtcgtgctccaggaacggaatcaaactggccgccaccgaaaccaattgcttcggcgacacgtccatgtaatccaccttcgccggctccacgtccacgaaatcgcccttgcgacggcacgtcaccgtggcggtggtgaagtggcctttttcatcaatcggcgcattcgcctgcgccacggtgaagttctcctcccggtccgcagtcagatactcaatttcatccgtcacacggcccttgaccaccttgcgatagggtgtctccaaaaacccaaactcgttcacccgcgcaaacgtcgccagcgaggctatcaagccaatgttcggaccttccggagtttccaccggacaaatccgcccgtaatggctcgggtgcacgtcgcgcacctcaaacccggcacgatcccgcgacaaacctcccggccccagcgcggacaaacgccgcttatgcgtcagctcggccagcggattaatctgatccatgaattggctaagctggctccgcccaaagaaatcgcgaatcaccgccgacaacgccttgggattgatcagcttctgcggcgtcatcgcctccaacgactggtcaaacaaagtcatgcgctccttgaccagccgctcggtgcgcgccaggcccacgcggcattggttggccagcaactcgcccaccgtccgcacgcgccggctgcccaggtggtcaatgtcgtccaacgttccctcgcccttcttcaggcgcagcaaatacttggtggcctccaccaaatcgctcttggtgaggatgcgcgtgtcgttcttgggcaggttgagtttctggttgatcttgtaacgccccacgcgccccaagtcatagcgtttgggatcgaaaaacagccgcttgatgagcgctcgtgcattggccgccgtcggcggatcccccggccgcaaccgccggtaaatatccttgagggcctcatcctcgttcttggtcgggtccttcttgatgcatttgatgatgatgccgtcgtccactgacgtgtccaccacccgcaacaccttgacccccagctcgccaatctgcttcaccaccgcacgcgacaacggctcaaaagcccgcgccacaaccaaccccttgtcctcatccaccacgtcctcgatgagcaccttgttgggaagatcatcgcgtttctcagcttctttgatgggcagctcttcaatggtgtaaaaaagcttcaacaactcggcatcgctgccacggttggcgtcccctttgcccttttccggctcgtccaaaaatgccagcgcacggaagaaagtcgtggtcaaaaatttgcgacgccgcttcttgcggtccagatacacataaagcaaatcgctcgtgtcaaactgcgcctcgtaccatgaaccgcggtcggggatgatgcggaaagaatgaagcgtcttgccgttgggatgctgggttgcttcaaaagcaatacccggcgaacggtgcaactggctgacaatgacccgctcggcgccgttgatgacaaaactcccctgcggagtcatcagcggcagctcgcccatgaacacttcctcttcgcgggcgaccttgccgttttcctccaaacggaaagtgacatggagcggtgcgccgtaagtctgcccttcgcgcaggcactccagccacgtcatcttgggctcgccaatcttataagaggcaaagtccagcttgaacttgccgtcgtagctctcgaccggaaacacctcccggaacaccgcctggaggcccacgtctttgcgtcgtcccggcgggacatcagactgcaaaaactccttgtaggaggtggtctgcagttcgataagatccggcgggttgatcacttctttaatcttgccgaaattcttgcgttcgatggctcgcgttgacatgggacttgctctattgggccggcggcatgtacagcctgtacatcccgacagccgggttcgggcttagacagcacaaggcgagtccccccttcccggggagtgctcgccaaaacatggatgaatccaaccgatactacgacttttatcttgccagtccgccctgccggccgcccgcaaaccggacaaccggccgaaggggggcgccacccggcgccacccctccagcggacaattacttgagttccacggatgcgccggcctcttccagcttcttcttggccgcttcagcatccgccttgttggcgccttcaagcaccggcttgggagcgccttccaccagcgccttggcttccgccaatcccagaccagccttgatctcgcgcaccgccttgatgacggcaatcttcttgtcggcaggcaccttggccaggatcacgtcaaacgtatccttggcctcggcaggcgccgcagcagcagcaccacccgccggggcagccccagccgccgccaccgctaccggcgcagccgccgtcacaccccatttggcttccagttctttcaccagctccgcgatctccaatacggtcgcgttgctcagttcttccacgatttttgctttatccagtgccataggtcctttctgtttcgccgcccggcgtggccacgccggatttcagcccgctgcccgcaggccggcgagttacatgttaggttgttgactttttccccagccgttggctgcagcaggagaaaaactgtgatgttaattctctcgaaaaaggcttgctcatgccgccgcaggcgcgccttctttttgcgccttggcctgcagtactcgcgccagttgcgatgccggcgtgttgagcagcgccaccagcttggtggccggcgcctgcaacagacccagcaacttggcctgcaacacctcgcgcgacggcaaatccgccagcgccaaaaccatggacgcttccaaccgctgattgttcaaatatccaaagcggattttcggcttgtcctgctccgcagcggcaaacgtcttgagcgccttggccgccaaggtcacatccttcttcccggtcaccaccgccaccggcccctccaagggcccaggaagctccacccccgccgccttggcggcatgccgaaacaggctgtttttgaccacatgaagctccgcacccgcctccgccaattggcggcgcagggtcgtaagctgggccactttcagtccggtatagtccaccgccacaaaaaacggagacgcattcaaccggttgagatattcctgagttaaattttgtttttcagcacgcatgatgattccctccgctgcaggcttgcgttatgtggtggcgaactccttcaagtccaccggcaccggcggactcatcgtcgtggagatggtgcagctcaaaatgtagcgccccttcacactcgaaggccgcgccttttgaatcgcctcaatcaccgtccgggcgttttcctcaatctgctcgggtgcaaaattaatcttgcccaccggcacatgcacattaccgcccttgtccaccttgaactccacacgacccgccttgaactccttcaccgccttggcagtgtcgtcggtcaccgtgccggtcttgggattgggcatcaaaccacgaggaccaaggattttgcccagtttgcgcacttcggtcatcgcctccggcgtggcaatcgcaatgtcaaattccgcccagccttcctggcacttcttaatcatgtcctcaaagccgacatactcggctccggcggcttttgctgcctcggcggaagcgccgctcttggcaaacaccagcacccgcaccaccttgccggtgccatgaggcaacggtacagtgccgcgaatcatctggtcactttgcttcgggtccaccccaagatgaaacgccaaatccaccgtctctgtgaacttggcccggggcattttggccaacagcgccaccgccgccttcagcggctgcgccttcttgccatccagcaggctcagggccttcttgtatcgtttgctgcgttttgctgccatgttaatggttgcggtacaatcgagggggactccctctcccgcgttggtttgttgttagtccacgatttcaatacccatgttgcgggccgttcccgcaatcatgcgaaacgccgcctcctccgagttggcgttcaaatctttctgtttgatcttgacaatctccatcacctgcttgcgggtgactttgcccactttttccttgttcggcaccttcgagccggtggcaatccccgctgccttcttcaacaaaaccgacgccggcggcgacttcgtgatgaaggtgaaggacttgtcctgatacaccgtaatcaccaccggaatcgtcatgcccgcctggctctgcgtcttggcgttgaattccttgcaaaacgccatgatgttcacaccatgctgacccagggcagggcccaccggcggggccggattcgcctggccggcggtgatttgcaacttaatctgtccaacaactttctttgccataaatcaatcttcgtcctgtccgcaacgcttacgttttttccacctgccaatactccagttccaccggggtgttgcgtccaaaaatgttcaccgtcaccttgagcttgcctcgctccggctcaatttcctcaataaccccgctgaaattcaggaacggcccgtcgttaatcttcaccgtctcgcccacttcaaagttgaccttcggcttctccacatcctccgactcgctgatttgagccttgatgctctcaatctcctcatccgccgtcggcgccggacggtcccctccaacaaacccaatgatgccctgcgtctcgcgtatgaaataccacgggcggtcaatcacccggttgttctcatccaggagcttcatccgcaaaaacacgtacccgggataaagcttgcgggtgctgacggtctttttgccgccacgcacatccacaatcttttccatcggcaccaatacctcctcgatgtattcctgcatctcctccgccttgatgcgcttctccaggctctccttgaccttgagttcctggccggcaagggtgtggaccacaaaccactggctcttggatgagggcataaactcgaaaaaggggcgttaaacagtggtcacaaaccgcatcaccaaaagcagcaccgaatccaccacaatggtgaacaggctcaacaaaaccaccgacaccagcaccaccaccgtgctgcctttcaactcctcacgaccaggccaggtgcatttgcgcaactcctcccgcgtctcctgaatatactgattcaggcgcaaaaaatgccctttccgccagaggtagaacaccacggcggccaaggcagccagcccgattatcttcaaaatttcacctgtttccatatcagtctcctgacttggcggagagggagggattcgaacccccgtcccgcgatgcgggaagcggttttcaagaccgccgcattagaccactctgccacctctccggcaaaaaaactggcagggcgtgagggactcgaacccccaacaggcggttttggagaccgctactctaccaattgagctaacgccctgttgccgcagagattgttgctcactgtctctccggtcgcttgccggtggttcgcaccgggcgccccgccacgccggcaggacgcccgcgcctgtcaaactgttcgttaatccaaaatttccgtgatacgaccggccccaatggtccgaccgccttcacgaatcgcaaaacgctgcaacttctccatggccaccggcgcaatcaccttgatctccatggacacgttgtcgcccggcatcaccatctccacgccctgcggcagcgtcaccgtccccgtcacgtcggtggtgcggaaatagaactgcggacgataattggtgaagaacggcgtatgacggccaccttcttccttcgacaacacgtacacctcggccttgaagtgcgtgtgcggcgtaatcgaacccggcttcgccagcaccatgccgcgctccacctcttccttcttcacaccgcgcagcagcacgcccacgttgtcgcccgcctgcgcgctgtccagcagcttgcggaacatttcaatgtccgtcgccaccgtcttgcgcgtctcacgcaaccccacgatttccacttcctccatgcgcttgagcacaccgcgctccacacggccggtcaccacggtgccgcggccttcaatgttgaacacgtcttcaatgcacatcaagaacggcttgtccacttcgcgcgtgggcagcggaatgtaatcgtcaatggcctggagcaggtcttccacagccttgatgccctcaggcttcaattccatggcggcgcgggagctgccacggatcaccggcgccttcgctccgtcgaaaccgtacttggtcaacaagtcccgcacttccatctccaccagctccagcaaatccttgtcgtccaccaggtcaatcttgttcaaaaacaccacaatcgccggcacacccacctggcgggccaacaatatgtgctcgcgcgtctgaggcatcggaccctcggcggcatccaccaccagaatcgcgccgtccatctgcgccgcgccggtgatcatgttcttgatgaagtccgcgtggcccgggcagtcaatgtgcgcgtagtgccggttgttgctctcgtattccacgtgagagaccgcgatggtcaccgtcttggtttcgtcacgcaccgtgccgcccttggtgatgtcggcgtagctgatcggcttggccaaccccttttgggattgcacatgcacgattgcagcggtcagcgtggacttcccatggtcaatgtgcccaatcgtccccacgttgacgtgtggcttcgtacgttgaaattgctcttttgccatcgcagttcctacggttgatgtttacggtttttaacaactgtttcgggcggccatcgccgccacactttttttcatggagcccatgatcaggattgaactgatgacctcgtccttaccaaggacgcgctctgccaactgagctacatgggcatccatgtatcactttcctgtcattgtaaaagacaaaactcccgtcagaccctgtgcttcttcccgaaaaacccacagggactaacgtagtcgtcctgtaataggcccaatgacgccggggaaattacgcccctgcaaaaaaattgtcaaagctttttttccactttttttccctcaccttgccccacttccaccgcctccgccacccggccatcccaccgccgcatcaaatggttgcccgcccaaatgaccatccccgccatcaccaaccccccgggtatgtccaccgcataatggtagcggcaatacaccgtgctcaaacacaacaaaaccaccaccaccgcatgcgcccaccgtattccacgaatatagcgccatgaaaaatacaacgtcgtcaccgccaccgccacatggctgctcggaaaggccgcccccggcgtctcaaaatgatgataaatcagcgccatgatttgaaaaaacggccccttctgcaccgccgccggaaagtcaggcaccgtcgtcggcatcaccgccgccggcaaatcaaaatccccaaaatcccggtaaaaaatccgcgggcccaccaccggcaaaaagatatagaccagaaaacacgcataaaaaaccaccgaaaccagggtgatgtaatggaaaaattgcctccgatcttgccggtacaacgccagcccacaccccgttatcatgatataatacgaaaaataagacacataaaaaacctcactcacccacaggtacggcagtttgtccatgaacagcaaactcggctggcacccaaacaaccgttcctccatccggatgaaccacgggtccaacatccccgtggcaaacatctgattcaaatgccccgtctcattgtaaatcgggacatacaacatgatgggataaaaatgccggacaaaccgcagcaatgccccatgtcggcccgtcgcttcttcacatatcaacaaatgaatcatccccaccaaccccagatgccccaacaccaaccaccgccactgcggcactgtttcattgtgaaagataagcaccaacaaccccaccaaggccacatacccctgggtcgccacatcaataaaacgataatgcctcatgcctcccaacctcccctcatcccaaccaccccgcctcacgataccaatccaaagtggccggcaccccttgcgccgcagccgtgggcgcctcaaagcccgtcatctcccgcaaacggctcacatcacacacccaccccgccgcggcaagttccttgtatttctgcaaattcaccacattgggacggcgggtgatctgcgaaatgatttcctgaaccgcgcacaccggccacaaagccgccacaggcaaggccaggggaaacggtttgactccccaatgccgcgccgccaactctcccagttgccgtacattcaccacctccggatgcgccacgtgaaacacctgtcccaccgcaccctcatgcgtcaaacaatgcacaaccgccgccgccaaatccggcgcatataccaagctcaactgctggcgtcccccgccaaagcacggcaacacaccgcgccgcaccgccttgaacaacttgaaaaactcaccatcccgcggcccataaacacccgggggtctcaaaaccaccgccggcacacggcattgctcccgcaccacctgctcggcggccagcttgctcttcccgtaatcggtcaatggcctcggtggatccgactcccgcgccggccgcgccgccgtggccggccccgtaaccgccaaactggaaatgtgcaccaaccgttgtacttccgatgcacgacgattgatggccgccaccaagttcaaagtgccagcatgattgatttggaaataaccctccctgtccagcgccttggtggcccccgcgcaatgcaccacatgcgtcaccccctccagggccgaccccaaagattccgccgactccagcgatccctccccaatttccaccttccccaagtgcccctgcaaccacttccgcgggctgctggaccgcagcagcacccgcaccggccaacccgcccccacaaggcggtccagcacgtggctgcccaccagcccgctggcgccggtcaacagcactttcatggtcggctaaatcagccccagttcacgccccacctgggcaaattgttccagcgcaaaatctatttgcgcatcggtgtgcgtcgccatcaagctcaccctcagcagttccatcccaggcggtatgcccggagaaaccaccggattcacaaacaccccccgctcctgcaatcgcttgcaaaactggaacgtcttgagcatgtcccggatatacaccggcaatatcggcgtctgcgatcctcccaaatcaaaccccagcgacaacaacccccgcttcatccgctcggtgttctgccacaaccgcgcaattcgctccggctcgctctgcatgatcttgaccgccgccaacaccgccgccgcattggccgggctcatgctcgcgctgaaaatcaccgttttggaatgatgcttcagataatcaatcgtggctgcatccgacgcaatgaaccccccaagactcgccagcgacttgctaaacgtgcccatgatgaactgcacttgatcggtcaacccaaaatggctcgccgtccctgcgccattcactcccaatacgccgatcccgtgcgcatcatccaccatcaccgccgcccggtactcccgcgccaaacggcagacctccggcaaattgatgatgtccccctccatgctgaaaacaccatccaccacaatcatcttgcccgcatccaaaggcagcttttgcaaccgcgcctccagcgcacccatgtcattatgcgcaaaacgcgaataatcccccagcgccaatcggcacccctccacaagactggcgtgattgctcttgtccgccaaaatatattcatccttgcccgccatcacgctgatgacccccagattcacttgaaatcccgtgctgtacaaaagcacagccggcttgttcaccagccgcgccagcgcctcctccaactccaaatgcaaatccagcgtgccattcaaaaaccgggaccccgcacagccgctcccatacttggccaccgccgccatcgcggcttccttgatcttgggatgattcgtcagccccaaataactgttcgaccccaacatcaaaaccttccggccattcatgatgacctcggtatcctgcgccgaggaaatcgtgcggaaatagggataaagccccatcgcacgcacttgctcggcacttttgaacgcgcgcaccttgtcaaacaacggcaaatccgctgtttccgccgtgcacgccggcggatttttggctccaaggccctgttctatcatgggcgaataggtgtcccgactcatataagtcggccctttgtgtcgcaagttggggttatttattcaatcaaaattattgggagcacaaacacccccctgcctcccgcccccgttggaaaaagggcgcgcaaccggaaatactcatggaaatatcgtggtccccccctcaagcctcgccgttggcacggcggaaaatctcaaggtgatccaccacattgatattgtgctgctgcagagtttgcaccgcccgatccggatcatcaaaacggaacaccagcacgcctttgttctcctttttcaacgtaaaggcatacatgtactccacattgatgccggtcccctccaacaccgcaagcacctcggccagcccgcccggcttgtccggcacctcaatcgccaccacatcggtgaccttcaccacaaagccgttttgctcaagcaacacccgcgccttctcccagtcgcgcaaaatcagccgcaaaatgccgaaattttgcgtatccgcgatggagagcgtcgtgatgttcaacccctcggcggccagcacgcgcatcggcgcgctcagtgccccgggtttgttttccaaaaacagagagagttgtttcagtttcatggctgtggagcggttacattttgcgctggtcaatcacccgtttggccttgccctcgctgcgttgcaacgtgcggggcgtcaccagccgcactcgggcccgaatgcccaccgtgctttcaatcgcgtgcgaaagccgttgctgcagcgcctccaaggcgccaatcgtgtcgctgaaaacctcggctgtcacctccacctgcacctccatctcatccagccccttctcgcgggtcaggatgatttggtaatgaggcaacgtcccttccacactcaacagcgcggcctcaatttgcgagggatacacattgaccccacggatgatgaacatgtcatcactccgccggctgatgcgcttgatgcggcgaagcgtgcgcccgcaggcgcaaggttcactcgtcagcgccgtaatgtcacgcgtccgatagcggatcatcggcatcgcctgcttggccagcgtcgtgagcacaagctcgccctcctgttcatcccccaacacctcgccggtctgcggatcaatgatttccgggtagaaaaagtcctcaaaaatatgcggcccacactggcactgacattccatcgccacacccggccccacaatctccgacaacccgtaaatatcatacgcccggatgccgctctcggcctggatgcgctgccgcatgctctccgtccacggctccgccccaaaaatgcccgcccgcaaaggcagctcccgcaaatcaatccccatctcagacgcctgatcgagaatgtgcaaaaaataactcggcgtgcagcaaatcaccgtcaccccaaaatccttcatcaccataagctgccgctgcgtgttcccgccgctgatgggaatcaccgtagcccctagccgctccgcaccataatgcgcccccagcccgccggtgaacagcccgtaaccatacgcgttttgaatgatgtcccccgcgtgcaccccgcaggccgcaaaactccgcaccatcgcctgcgtccacacctcgatgtccgccgcattatacgccaccacaatcggcttgcccgtcgtcccgctcgaagcatgaagccgcacaatctcatgcatcggactcgcaaacaaaccaaaaggatacgtatcccgcaaatccgtcttgaccatgaaaggcagccgcgcaatgtcctccaacccgcgcaaatcagcgggcttcaccccccgctcatccatgcgctgacggaaaagctgctgatgatcataagcgcgctggacaatcgccttcaaccgctggaattgcaatgcgcgcaattgcgccggcggcaaaaaatccggggcgcttaccggatgaaacggaatatcggtaacggatttgctcatgaggaaggttacaggattgattgtccgcaaaacgcctccccgcccgccttccgcatcgtgcaaaaatcaaccccgcgggccaaccacccgcatggccacacagcaggcttgcgtttcgcgtgaacaccgcccccaccctaccccctccccacccccccggcaactccaaactgcacccttcgatttgcccctgagtcaattcgtaatcacctgatcaatttcgaaagtgaatcatgggtcgggacgtttcctcgatcatcagtctcggtttccaagttccgttggaaattggtttgaccggagcgtgggttcgcccaacatagccgcggcatgaaacctaaagcgtatgcggcggcgggggtggatattgacctgggcaaccgggtaaaggccactctacccaagttgctcgccgccactcatcggcgggaagtcctcggcaaggtgggcggatttggcgggttgtttgcgctggacacccggaagtaccgccagcccgtgctcgtttccagtgtggacggcgtgggcaccaaattgaaaatcgccttcgcgatggacaagcacgacaccatcggacaggacttggtgaatcattgtgtcaacgacatcgccgtgctgggtgctgagccgttgtttttcctcgattatctcggcaccggtgtgctcgagcctcgggtgttcaccgaaatcatcaaaggttttgccgtggcctgcgcgcaaaacggctgcgcattgatcggtggcgagactgcgcaaatgcccggtttctaccagcccggcgaatatgatgtcagcgggacgattgtgggagtggtggagaaaaagtccatgctcgatggccgtggtgtgcggcctggcgatgcgttggtgggactcgcatccagcggtctgcataccaacggctattcgctggcccgcaagattttctttgaacaaatgggcctgcgccctgacagccggttgccggagctggggcagactttgggggaagaactgctgaaggtgcacgtgagttacgggccggtggtgcaggcgttactcaagcgcttcaatgcgccaggggccccgcgccgcatcaaagcgctggcccacatcaccggcggtggttttgtggacaacatcccgcgggtgttgccatcgggatgcgatgcagtcattcgaaaaggtacctgggaagtattgcccattttccggctgttggcggaggtgggcaaggtgccggagcaggagatgtatcaagtattcaacatgggtgtgggaatggtggcgatggtggcggcggaccaggcggattcggtggtgcgcttcatccggcgccgggggcaccaggcttggattgtgggtgaaattgtgaagggccgcggcgtgacgcgagtggtttgacgctggaagtttaatccgccgggcgccagtcgagcacctggagctgcacttgagattgaccgttgtaccgattgatttggggaatcacggcaaggtcaaaaacgcccacaggccaatgtttgtcagcgcctttccaccacacggcttccatggtgaggcgcccatcggtcacccacagtttcaagtgctgttggtgggcgccgatgcgcagcgggacgcgctggttgaccaggcggtggacgcaaagatgcaccggcgggttgttttgcccaaaaggcgccaagcgttccaaggcggccaccgtctcaaccgttaattccgccaaagaggtgcctgcatccagacgcagagggggaatgagctgatcatgtttcaaccaacaacggcccaattcgttcaagcgcgtgcgaaaagcggggaggttttccgggcgcaaggtgacgccggccgccattttgtggccgccgtggcgttccaacaaatcgtgacactgctccaaggcggcggcgaggtcgaagccttcaatgctgcgcccggagccgcgcagccaggggccgtcgcccccaagaataatcgttggccggtaaaagttctggaggacacgcgcagcaacgatgcccaccacgccgatatgaaaatcgggatggccggccacgatgacgaaatccttttcagggttaaacgtggcttccagttgttcaaggagggtggagaggatttgtttttccaattcctgccgctcgcggttgcggcggtcgaggctggcggccaggggttcggcttcttccaaggtttcggccagtaacaagcgcaaggcttcctcggcggattcaaggcgcccggcggcattgacacgcgggcccagttgaaagccgatgtcgcgcacgcccaccggttcgcggacctgggccacagccttgagggcttgcaagcctgcgcggcgggtggtgttgatgtgtttgagccctgcgctcaccaagatgcggttttcgccctgaaggggtaccagatcggccaccgtacccagagcgacaaggtccaacaggggccgcaaatcagtttccatgaactcgggctgattcaggcggcgtccttctcgggtcaaggcgtgaacaagtttgaaggcaagtcccaccgagcaaagctcggtgaagggggcgtccacggcggagggatgggttgaaaaaggattgaccagggcggtggccggcgggagggctgccgcacattgatgatggtccagcacaatgacctccactccttcgctttggaggcgagagatggtttccaccgccgttgaaccgcagtccacggccagcagcaggtgggccggatgctgggcaagacaattgcgcgccgcatcctccgtcaggccgtaaccttcttccatgcggtgaggcagatatgtgcgcaccacccagccgtggcggctgagaaaaagttgcaacaaagccgtggcggaaacaccatccacatcgtaatccccgaagatgaccaccatttccccgcgttcacgggcggcccacaaccggctcacggcctcggccatgccgggaataagcaaggggtcctgaagctcgcgcaggcgcgggttgagaaaacggctggcctgcgcaggttccgagtggccgcggttgacaaggcactgcgcgaccaatggcggcagcgaaagctcgcgcaccaggcgttgcaccaacaacggttcggccggggcggtggaccaccggtatttcatgaggcacggccgaaaccggcagaaaagtttccatcaatcatgaagcagggatatagcaaacgaggctcaaaagtaaatggcgcgatgccgcggccaaatgttttcgggggggttgcacgaggccgctggagttgggccgccagcaaaattttcttccaagacttcaacgcgctccggtcccctgcaacacagcagggatggtgcggaagaggattttcaaatcgagccacaaagaccaatggtcaatgtattcaaggtccagacggacccattccttgaaatcgctgacgttgttgcggccgctgatttgccataggcacgtcaggcccggtttcacgctcaaacgccgccgatgagacaggtcatcaaatcgcgccacttccatgaccggcagggggcggggacccaccaggctcatctcgccccgcaacacattgatgagctggggcaattcatccagactgtatttacgcaagaagcggccgatgggcgtgacgcgagggtcctgggaaattttgaagacgggcccctgcatttcgttgagggactccaactcgtggcggagctgctcggcgttggtgaccatggtgcggaatttcaacatgacaaaaggcttgccatgcagcccgcagcgttcctgacgaaagaggatcggccccggactggtcaaccgaatcagcaacgcaatcagcagcatgacgggcgccagaataaaaagtcccaccagcgctccagtgtaatccatgatttgcttggccaaagattgccaactggcttcgggggcgctgcggaacaccacaaccggcaggtccatgaattcgtccagcgaagtccggtaggtctgtgttttgaagaagcccaccaccatccacgcctccacgccctccagctcgcaggcttggaggatttgctcggcttcccggaagttgctgtggccgcagtgcaccaaaacagcgtgggcggaatgttgatgcaaaaggcccgtgagaacttcgggtttattccgttccaaattcaattcggccaccaccgtggcggagccgggccctaaagatttgagcttggagcgcaggatttggaggtccccttcgttgccgcccaccacgataacgcgtttctccaattggtcgcggccatggctggtatggtagaggccgctgagaagcaattccttgcccatcaacaagagaaaactaataccaccatagagcacgagcacgccacgggccagttgctcgcggaacagaaacatggcgagaatggcggccagtgtagtaacaacgctggctttgagaatcatgagcgccgtgcgccgccgcgagaagaataggggtcgttggtaaaagccaaaccaactcaaggcaatccatgccgtgggggcaatgaccaaccaaagccacatgaaatcatcgaagggggcaatggggtcgcgtcccagaagatgctggtttttggagcgcagctcatgggccacccacaacgccagcaaatgcaggccggtgtccatcacttgatggacccgcgtgcgaagagcgctggaacgtcgcagcatgatattctttacaacctgatcgagccgagtcgtcgagccgggttgtccggcatccatttaagccccgatcggggcatcggcgtcaagtccccccatgccgtcaaggcagggctcgggcttgcgccttgaccggcggggccggtggcaactgaaactgaggcacggcttcttgaatccattgcaccatccacttcacggtggcctcttcctcacccggtgcgcaggtggtgaaaagggaaatgtaggcccagcgttgcagctcgccggtgcgcaacatgtgcagtgtttgagaccagacgcggcgcgtgtgcagcgccgaaatttcgccatcggctacaaaccagtaaagatacattccgcgcaaggtgacttcccctttgggggtctgcatggtcttagtggactggactttcatcaccggcaaggagtattcgatgggccgctgcatcggcacttgaatgatctcggtgtcgctggccttgtattcccaaccctggccgttgagacaaaactccggcttgtgaatgctggtgcggtcgccacccatgaggaccacactcaccaaaagtttccgttcatcaggccattcgtacaaacggcggccgtaggtggtgtcggagggcagccagatgagttcgagtttgctcaccggcaccgaagtggaggtggctcccatcacttcaggcggcaggtacacactttgtggcatgaccagccggccatcttcaccccaagtgggttcattaacgagtttgacccccggggcgccaagatgctgccgggttttggcctggttcaatgccatccccgtccctaccatcaacaatagggccgccacaaaaacctgcactgcgcgctttgtcatacgacttcaggaacacccgccggcggggggacgcggcgaggggtaaacagtttgccggtcaggtacaccattgcaaatcctaccacgtaaggtaggaaactcaacacggtgctgttatggacgtaattaccgccttcctgcccgaacacctggcctgcggccacaatgagaagcaaacgcaacacattgctgacaatggccgccggcacagccataagcacaatgatgccccgctgccacatcggtttgaaaaacacaaacccgtaaatcatggtcagcacaagcagcgcggtcaggctttgaatgccactacaggccggggcgatttcatattggaatttaccgctgggatcaaaaatctgcgtgccgttttgaatgaccggcacccccagcacgtgatgcgacaacgccacggtaatctgcgtggccactagtcgcagcggaaaggtgatggcctccgactgcgtggccaaaggcacgcaaaacaccagaaggcagaagggaaacacggttttcttcaaccacaaccatccccacaacaggcccgtgatggcgtaaatgcccaaataaaaacctaaaatggaaatgcgcgcctgctgggccaggtaaccgagcaggtgtagtcctgaggcgatggccagcagtcccagagccggccaccaaggcgctttgggcagaggcagtaattcctggcgtttccaccacaagagcatcaacaccagcaggggcatgtagtagccatgttggtcttcgggactccattcgtaggcgtgaatcatccaacccagaaggcttccggtcttgatgtagccgaaggtgctgttgccccaaaagtgaaacaacaaaatccacactgccagcagggcccagaagagttcgcgatggggaaattgggcccatgccgccgtcacgtccgcccagagttggcgggctgcagcaagcaaacttttttgctgttcggtctgttgggtggtggcttccacactcatgcgcttacgtaccgcgcattaatttagacaagcttggcacccaattcactcaaaaatagcgaaaaaaagatggtcttgtcctgaaacaggcaatcaaggtttaaaaagcggatcctccaccgtttgctgccattcttgcagggatttcttcaattgctccatcacatcggcaaaatttgcctcgccggaaagatcgcgtgtttcccatgggtccttgcgcagatcaaagagctgaacacggttggcctggggataaacgaggagtttgtagcgctcgtcgcgcaccatgcgttgatgttcccgataggcagcgtaaagcgtggtataaaccttatcttcgcgtccctgcataatgcccaccagactgcggccctccaccaccggcggcaccggcaggccggaaagctcacacaacgttggaaaaacatcgtgcaaatagcacagcgcagccgagcggcgattggacggcacaccgggcccgctgaaaacaagcggcacacgcacactgtgatcgtaaaggttttgcttgccgagcaacccgtgttgcccgacagccaaaccattgtcaccaccaaagaccaccaacgtctgccgccgaagcccccgagcctccaacgtgttcaaaatgcgcccgatttcggcatccaaatgcgatatcattccgtaataggctgcaatttcctgctgcaccgccttcggggtacgaggccaggggagcaatttttcatcgcggaccttgagctcaccattgtcgaaggggtgctccggtaaaaaattggggggcagtttgattttctcggggcgatacatcgcagcaaactccgggggcggcgttcgcggatcgtgcggcgcagtgaaagccacgtaaagaaagaaaggctgttccactggatgtcgctccaaaaattggatggctgcgttggcaaagagggtggaggaaaaaacacggttggtttggcggcggttgttcggatacgcgccagtgggatcgtagctgtgcaccggcacctgctcatgatcatgcatgccaccaaagaaaattgcgtcgcccgctgtaaaagcccgattgaaggaaggtttatcgttgtgccacttccccactgcaaaagtgcggtaaccggcggagcgaaagacctccggcatgagcactgcgggagtacggatgacatggtctgccgggcgtccctgcgcggcaggcaaagcagcgcggtacaaggtgcggcctgtcatcaacatcgcgcggctgggcatgcaaatcgccccctggcggccgcccatgatgtgggcgtgagtgaaggcaaacccttctttcacaaggcggtccaggtgaggcgtgcgaatggcggaattgcccagcgcgtggatggtatcgaaacgctggtcatcggccagcaggatgagcacattgggcggcggcgctgctgcggcaaccaccactattgttaaaaagcagatggccgccggaaggttgcgtaatcgtcggatcatgcctttttctatcaggctaccgccttgggggcaaaggcgaaaaccaagccaccaaatcaaggagatccgcgatttcaaggggtggctggcacattccagcgctcgcggtcggtgaggaagagttgctcaggaaagaggtcagcgtaggcatgtttgaggggaaagccttcaggaacctcccgccgcaaaaggcattgggcaatgaacatgccccagccctggttttcgccctgcacccactgggtgagaaagcggttgtccaaggtctgcggcgtcaaataaagcgccttgattggatgctgccggtggatcgcttggaaatcaccctcggaattaaggggcagccacacgcatgtgcggttgccgtaccatgccacggcccaagggatgtcactcatcatcaattcatccggttgcatccacgcggaaacagcctgaatgacccgcggcgcgtaaggcgggtaggccatcatgggcgagcgcggaggcagcagcttcaccaccaaaggtgccatggccaccaacaaaaacccgcccacgaacaatggccgcgcctcccataccgcggcgcgcgcctgatccaaaagcgtgaagaaaagtgccacaccgaacatgaccaccaacggtgtcatccaaaccaaaacgttttcggaggagacctcgcgcaacgtctggcgcggactgcccgacaacgcctgaacacccgtcaacaacagcaatgacagtagtacaaacaacctcaatcgcgacaacaccggtctgcggaaaggcaccagcaagccgacaagaaaaaaggcgctcacccatgtgccgccgaggcgcggcaaatcttccggcaccacctggcgcaggccctgcaccagtttcagcggcaaatccaacgcctccacgtgcgtaaaatcaggctccaaagaccgcggcaacgtgcttgcaggaaaactcggggtgccctcgtacaacacatagccggccgtgccgaagaaggttccgctcaattcataattccgccacaaccagggggccaccaccgcaagagacaccagcgaggtcataatcagcgccaaccagcggcgcacgccaagatgcgccagcacaaacaccaccaccggcaaggcaagccacgcgaaggcatagcgggtcaacacgcccagcccgagcaccaatccggtcaacgcgcccagccctgccatgcgccatccgctgcaaaactcctcggctccacgctccaaccacaccaaacaccagatcaaagccagcgcccacaccatgaccaataaggtggagccgccgctcatgctcacgcgccacaacaattccgtgcccatcaacaccaccgcggtcagccaggccaccccctcatcgaacaaccggcgggccagtgcgtaggccatccaaaccaccacgaaaaacaacacttgattgagaagcacgatggccagctcgggcaagggccgcgacggctttgcatccgccgcaattttgtcctccaaaggaaaaagtttcatcaagcccgacagcaacaccgggtaggccggaggataatgcaagtcgggcatgggctttcccagttgggcgggagccagcaggcggtcaaaggcctggcgttgttcgggagtccagcggctttcgtccggcggcaacttgcgacgcgcatcctcggccttgcgcacggcctgtttttgaagcagatgcacggccagcggatgaatgcttcgggtgacatacccttcgccgcgggccaggttgcgtgccaattgagcctgctccatggtctcgggcagttcaaagttgcgccaagcccgcacgtcataaatggcggccagccctgccacactgagcaataacaaggcaaacttcagcgaccggttgccggcgccttccgtccaatgataaatccattcctggatacccgacataaatgatacgctctttcggggcccgcgcctccacttgcgcaagctgtgcaagccaacatggagacagccccgccctcacgcaagttatttttgaaaaacttgaatttataaacgttctttgaaccagcgtcgcgttttttcccacatggccggcgtgtacacgtggccgaggccggagatgatttcattttcgaaatcggcctccgcatcataaaggcggtagatgggacgaacggcggcgtctatggcgcggatgccggagaccggagagccggcgtcctggtcgcccgtcatgaacaacatgggccgcggtgccgccaaggccacaacagcctcggtatcaaagtgccgcagcagcccgggcacataataataaatcccgtggtatttcagcccctcggcggcgatcaaatcttgataacgtgtgaggcaggccaccgccacaccggtcttggggcggtcatccaaagccatgatccaccaagtgcgcgtggcgcccatgctgatgcccgttacgccgatgcgtgccgggtccaccgccggatgggcggacaaatagtccaaagccatcaaatcatcccgcaccatcatcccccacaacgagcggccgtaccaaagttgaaacttgctggcgctcaattcaccagcgccgccccgctcggaggggcccccgggcccccggccattgcgctcgccgaaacaataagcatcaatggccaacaccacaaaaccatcgcgcaccaacgcggggccgggaggctccggcagggcgttggtgcggaacagttcttccttgcccacgtcgtaatgacctccatgccaatgacaatataaaatggccggtttgcgcgcagggccgtccttgggaatgaggaggtaaccggggacagtatcgccagcgccgttgtcaaaggtaaatcgctccaaggtgtagtaggtgcggtcttcacgcgagatggtttgaaccaccggcaccttgggacgaggcggcagatcccccaaggtggtccgaagggtggtgcggatttggcgtcgctgtttttcccacgccttgatgttggctggcgccttgaattccggcaccggcggcgccgattgcagccagtgctttccggcggacgactgaggttgtgccataagatgatgatgcaagagtccaaagacggccgacagaacggcccatttcaagtcaaggaatcgcataacaaaaaattacggtttgatcccatcaacgcaatgccaaaaccgaattaactcagaaatcaaaagtcaacggagccgggaggtgtacaagggcgttgccgattcattgaatcatatttgtggttacccaagcacagattttaaggctatctgccaatcgctaagagtcggccccctccctggccgcttccattgcgccttacatcgccaccagacgcacatgctcactttgatgttctcacgatgatgattgttttcattccgcgattaaagcttggcccgggcgatggcttttgctaacgtcccgcccatgccagagattgccaattacgtgagccacggggcgcgattgatcacgccggccatcatggagcgcgtgctgcgccaactccccatatggaaggttgagttcacccaaatcaacgcccccaagtatccccatctggtcacccagcttgaatttctggtggacgcagtggaggacttcgccgaaggcgcagacaaagacctcccctacgtcgccgtcgccgaggccctctttgccctcatgtatgcccataaaaaagtggacatcatccccgacttcatggcagccctcggccacgccgatgattccagcgtcgtccgcgccgccttgattcaaaacgaaaaggcatttgccgcctacgcccaacgccaaaagcgcgactggaaacgcatctccagcaagccttgagattcagcgcccctccccgctgcgggccggatcgcgtgccgccaaaaacgccaccaaatccgccgccatcttttcactaaaaccaggcacctcggcaatctcctccacacgggcgcgccgcaatcgctgcaccgacccaaactttttcagcagcgccgtcttccgctgctctccaatccccggaaactcatccaaaatgctctctgaaatcttgcgcaatcgcaactgggcgttgtatgcgttggccacccggtgcgattcatcccgcacccgttgcaacaacttgagcgccccccggtcatgcggcagccgcagcggctccgactccccgggccggtaaatctcctcaaattccttggccagccccaccaccggcacatccccaagccccagcgcctgcagctccttgaccgccgcgttcaactgccctttgcccccatcaatcaaaatcaactccggcatactcccacgcccgccctcccgcaaaacacgcgtgtaccgccgcctcaccgcctccgccatgcacgcaaaatcgtcctggccggtcacccccttgatttgataacgccggtaacccggcctgtcgggccgcccctccacaaaccgcaccaacgacgccactgccagcgtcccgctgatgttggatatgtcgaacccctcaatcacccgcggcggcctttccaatcccagggccgccgccaagtccgccaaatccgcctccggattcagcgccacaggaagattgtgcggcgtccgcgtaaatgtccgcgtcttgcgcgtggtttcctgtagagaggccagcaaatcccgcaactcggccgcccgttcaaactccagcttttgcgccgcctgccgcatctcctcctcaagccgccccgcaagctcctcacattgccccgccaaaaaatcacacgctgccaacacttgtgcgcggtactgttccaatgtcacgttcccaatacaaggcgcagtgcaaaacttcaaatgcccataaagacaatgcttgtaatccgcaggcccgggattcaacggccggcacccgcgcaaattaaactgtcgccgcaccagcgtcagcgtcgtccgcaacgcccgcccgctcggaaacggcccaaaataccgggccccatcgtccgttcgcagccgggtcaaagtgaaccgcggaatgggatcctgcagattcaccttcaccatcggaaaccgcttgtcatcccgaaaactgatgttgtaacgcggcctcaattccttgatgagccgcccctccaacaacaacgcctcaggctcgctccgcaccacgtgcacatccaaatccgccaccgcctccaccaacgcattcaacttcaaatcccacgccatccgccgcgacggttgaaaataggagctcacccgcttccgcaaatcccgcgccttgcccacataaatcaccgtccccaggcggtccttcatcaagtacacacccggtttgtgcggcaactgggcgagcttctgtctaagcgcttccgacaccggcatgcctccattatgcgccccattcccctccccgacaaccgcgattccacgcctattggccaagtttattcagaatttggctttacccttaaagcgattgacaaagcccctggagatgggaaatatgctcatcagttgcggttaatctcgcactgacgtgaattagatttgtccaacaacacaaggcgggattggctgtttttttgctttggcatttgacagaaaaataagagctattgtttgaactaatatcggtatgaaaattgtctctccacaggaagcggtcaaagtcattaaatccggcgactgcgtacacatccacgccatcgcctgcgtcccccacaaagtcgtccaggccatggtggaccgcggtcgcgccggtgaaatcaaaaacgtcaccatccgccacctccacaccgaaggccccgcccattatgtggagcgcgacctcgaaggcgttttccagctcaattcctacttcgtgggccacaacgtgcgcaaggccacccaggaaggctacgccgattacattcccgtttttctcggtgaaacccagcgtctcatccgtgaaggctacaccccggtcaacgtcgctctcatctctgtttccccgcccgacaaacatggttttgtctccctcggcacctcagtggaagccaccctcgccgccgtcgaatgtgccgacaccgtcatcgccaccatcaaccccaacatcccccgggcctttggcgatgccatgattaagaccgacatgattgacatctggtgcgaggacgatgcccccctcgtcgaggccaatttcgccgcacccaatgaagtcgaacaggccatcggcaaacacgtcgccgccctcgtcgaagacggcgccaccctccaaatgggaatcggcgccatccccaacgccgtcctggcccagctcggcaatcacaaaaacctcggcatccacaccgaaatgtttgccgacggcgtcctgccgctcgttgaaaaaggagtcatcaacggcaaggaaaaagccattgaccgcggacgcatcgtcgcaaccttcctcatgggctccaagaaagtgtacgacttcatccacgacaaccccgaagtcatgatgatggacgtcggctacaccaacagcctcgatgtcatcaaacgcaaccccaaggtcaccagcatcaactccgccatcgaagtggacatcacaggccaggtctgcgccgactccatcggcaccaaacacttcagcggtgtgggcggtcaaattgacttcctccgtggcgcctccctttccaagggcggcaaacccatcctcgccatgccctcgcagaccgacaagggcatcagcaaactcgtccccaccctcaaggttggcgccggcgtcgtcaccacccgcgccagcatccactggcttgtcaccgaatacggcgcagtcaatctttacggaaaatcactccaggaacgcgcccgcctcatcaccagcatcgctcaccccaaccaccgcgaaatgctcgacaaggccgcctttgaacgctggggtccccatttccactacatcccggccccctggaaaaaatagaaatcctcaatcattcaccccgcgcccggcccccaaagccgggcgtttttttatgcccacacttgcccccccgaggctggcctcaactttttaaaattccatttgatgaaatccgcccccgcattcgtctaatcccgtggacctatgaacaaccaaatcaatcgtcgtcgtttcctcaaagccggtctctttaccacggctgccctcaacattgtccccggcggagtcctcggccttaacggccaaacccccgccaacaaccgcctcaacatcgccggcatcggtgtcggtggccaaggccacagtgacctccgccaaatgaaaagcgaaaacattgtcgccctctgcgatgtggactggcggcatgccgctggcacttttaaagaatggcccgacgccaaaaaatacaaagattaccgcaagatgctcgacgaaatggaaaagagcattgacgccgtagtcgtcgccaccccggaccacgtccacgcctttgcaagcatcgccgccatgcagcgcggcaaacacgtctattgcgaaaaaccgctcacccattcggtgtgggaagcccgcatggtcgcccaggtggccaaagagaaaaaagttgccacccaaatgggcaaccaaggccaggcctccgaagaaactcggcgcttgtgcgaattcgtttgggacggcgccatcggcaacgtcctcgaagcccacatctggaccgaccgcccctcgcaaggattgtttaatgaatactggccccaaggcgtcgcacgccccaaagaaaccccacccgttcccccggatttggattgggatttgtgggtcggccccgcccccatgcgcccctaccatcccgcctatttgccgttcaaatggcgcggctggtgggacttcggcaccggcgcgctgggcgacatcggctgccacgccattgaccccatcttccgcgcttgcaaattgaccgcccccaccagcgtccaagcttcctccacccgagtcaacaccgagacctaccccctcggctccatggtcacctaccaattccccgcccgcggcaacatgccacccatgaaactggtctggtacgacggcggtttgcgcccgccgcgcccggacggcttgcccgacggcgtaaccatgggcgacaacggccgcctgctcgtcggcgacaagggtttcatcctcggcaaccgccttttccccgaagctcgacgcaaagaatacaccgaccctccgcgcaccatcgagcgctcgcccggccattaccaagaatggattttggcctgcaaaggcggcaaaacaccaggcagcaacttcgcctttgccggccccctggcagaagccgtgttattgggcaacgtcgccctccgcgtccaactccgcgaggaactcacccgcaccaagctgctttgggaccccgtcgccttcaagttccccaactgccccgaggccgacgcctttctcaaacgcgactatcgcgagggctggaaattaatctaaagccggagcctgttcacaccgccttcaaggcggcttgcaaatagcccagcgcatacgccatgccggcgtgccagggcgcagcacaactcatttgcggggcgtgatcgggaatgatcacccccgcaaaaccgtttcgcttcaaaatccgcaaaacctccaacacatccacatccccctcgtctataaaggtttccttgtacgtcggcaccttgccccgcacattgcgaagatgcacatacgcaatccgcccctgccggctgtacgcatccaccgcctcatacacatccccctcggtcatttccgcaagcgtccccacgcaaaactccagttgattccgcgggctcggcaccaaatcaatcaaccgctggtataaatgcggttgatacaccaaccgcggctgcccgcgcaccgtcggcatcggtggatcatccggatgtgccgccaacgtcacccccgcctcctccgccaccggcaacaccgcctcaagaaattcacgacaccgccgccaaagctcctccggagtggccgggggtacgttacccggcggcgcgttcggatcgtaaatcatgttccaaaccatccctctcggcatgggcttgtccatcggcccattcattcctaccgcctccgcccctccacgggcaaacggccccttcacccgcccggccacccccgcgatggaaaagttgtaacccataattggaatgccggcggcaccaagattgcggatgataatcttcaagttttcaagctgctctgccttgcgcggcccatccaacaaaacgtcgtgccagtgcgccgggtcaaaattttcaatggcctccagctccaaccccgctgcgttgacccgccgtctcagatctgtcagctcctccaccgtccacaggtgatgcgggtccccagccagcccccaaccggtgtcatcgcccaccggctggtcgccgggacgattgctgcgcgaagaccggaaataatccaccaaatgcgccacgatatgcgtgcagccgcattggcgcgcaaaacgaaaatgctcgtcatccaactgatgccggtaaagccccagtccaagtttcatgcgaagtcagaattaaaaaccaatgctcgcccccccatccaccggcagaataattccagtgacaaattgcgccgcaggcgaacacaaatacaccgccgccatgcccacatcttcaggcttgcccagccgccccatcggagtacggctcaatattttttgacgacgcgccggatcattcgccagcgccttctcagacatgtccgtctcgatccacccgggcgcaatggcattcactcgaataccgtgcggagacaattcagttgccaacgcccgcaccatccccacatacgcactcttggctgcactgtaggccaccacatacggaatcccaaacagcgatgccatcgaagcaataaataacaaactcccccgcccccgctccaccattcccggcaccaccgcccggctcagcgcatgcgctcccaaaacatgcgtcgtcaagacctgcaaaaactcctcctcagtcgtttccacagccggttttttcaaatgaatgccggcattgttgataagaatggtgatggagccatgcttcttttgcacccgctccacaaacgccggagcctcccccaattcatccacatcatgcactgcatagtccgccagcggcccaatcgtccgcacagccgcctccagtgcagcctgccggcgccccactaaaaccacacgcgccccggcagccgccaaacaccgtcccatcgccaaccccaaaccgctccctccccccgtgatgaccgccagctcattttgcagccggaaaggacaaggccacccttccaaatcacactcggacaccttcgtttgatgaatgttcagttgttcgttcatgatttcagcgccgcccgcctatggcgaacagcatcgggccggtaaatgtgggcacgttggcttcatttggcaaatccgaacctccccaccgcccccatccttcaaacctcatccccgcggccaaagtcgaaaccaaaacttcatcggcgcccgcaacaacaaatcccgcaaaagatcctcaaaccccgccgccttcggttccaccagccggcgcgtgctcaacaaagccgccaacgtcaccaacgccgccgccgcaaaaaagatgctataccgattccattccaccccggttgtttgatgccggaaatcaccgatggcatcaatcatcatgccccacaatatcggagccactccttgcgtgacgttccacgccacagaaaaaatcgcaaaaaaatggttgcgccccatcaccggcaccgacgccatcgccagccgcgtaaaagccatgttggccgaagccgcaaacaatcccatcgcgcccaacagccccatcaacaaaaccggcgacaccgccacgacgttggccgccatcaaccaccagccgcccaaaatcaaaacaaataccccaaacgccaacgccatcaccggcctgctccccagggcatccaaccggctgccaaacaaccaaagacttcccatccccccaaggtacaaggccgatgatagcaacaaaattcgcccctcggtcagcgctgcttccgtcttcaaataagccaccggaaacgcctgcatcccaccatacaccaccgcccacaacatcaccgtcaccaacaaccgctgaaacggtggatgccccaaaatggccccccacggcacttcccctgtccccccggccggttcttgcggcaccggcacatccggcatgcgcttgagaaaagtcagactggccgcccccgccaccgcgctgaaaacaaaaagcaaactgaaatggacaggttgaggattactccccaaaaacaaggcagccaccaaaaacaccacaatgctccccaagttgaccaccgccgcatcccgcgccaggtaacgcccccgaatctcttccgggacaaggctggtgatccacggcagccacgcacaactggaaatgccccgcgaaagattaaatccaaaaagcaaaaacaacagcagcgcaagctgcgtgcccttgtccaaaaatgcacccagcagcggcaccgcggccatcccaaaaataaacgccactcgaattccccatcctgcatacacaaaccgccggaaaccaagccggggaatgtattgcgcagccggtatttgaaaaataacgagcagcggcatcatgctgaccacaacccccaacaccgtggcgctggcccccaaactccgcgcatacaacaccatcgggctgctcagcacgatttgaaaggacagcgcgttgaacaacgcaaaccagtaagcgttacgaaaacccggaggcagtcgcggcgtttctgtcgttgttgatgttgaaacaggcatggaatttttggacaaagacgggcgcccacccatcaatatccccgcaaagccgtgcttgaccgcgcaggcaatccgggcgctggcgtccggcgaagcaccacatactcaatcccgttggcctcgcaaaacgcccgcttctccggtttgtcaccatcttcattgacggcgtaaatgtccgggcgcaaccgccgtatctcgggctcggcatccaaccacccccatcccgaagtaaccaacgcctgcgtaacgtgccgaatgctggccaccatataccgccgctcattctccgtctgcattggatggccttcccctttcaaatgccgcacattcgcgtcattccccaccgccacatacaaatccccaagcgcagacacctcctcaaaaaaccgcacatggccggagtgaagccaatcgtaacaacccgttacaataacctttttacgccccggctgaatcacccccattggcacctcgggaaaaccagccaacgcctcctcaggcaaaacatccgcccgccagccgtgctgctcacataactgccgccgctcacgcgaatcttcttccaccgggtaaacccaagccgccgcagccttgggtgccgcctcgggcacccccacattagcccccacaacttccacggcgctgacaaaccgaatggcttccacaaaataccggcgctcagccagaggaaatttgggcggacgccccgtcgcacgcaccaccgacgcgtcatcccacaacaacacatgcacccgcccccggcgcgccgcttcctgcaacaaccgcacatgccgggagcgcaagtcatcaaaagtccctgccaccaccactggaagttgctcattcatgcgttaaatccggatgcatggatgaaatgcgccgggtaccggttcctccgacaccacatacaaataaccaccaccacaccccgaatacatggccccggcataacgcgcttggtaatacttcaaaatggccttcaaatccaccgtcaggaacggatgccgcaccgtgttcggcagcagatattcccaacaatccatgcactcgttgagcgagcgccccaaggcccccgcatcccgtgcaagaatggccgcataacaatccttgcccgtttgcccaagccgccgcacccattccggctccaaacgctgctcgcccaacggatgataaccggggggccgcggcgcgatgggaagaatatgcaggacatgagccaaccactgcgcaatctccgaatcccggcaactttcaatgtgtttgggaaacagccccccttcatgcccggcatcataatccaaacgattgatcccgggataaagcagtccaatcatgtcctgcgaaccggaaggatcacttttgccttcgttttcggcgttgtaaagttcacgcaccaaaacggcaggctccccctccggcaggctatccccccacaattttcgcgccacagcacgtgtgcccgtggccaaaccagcccggtccatccaaggcggcaccggctccagattcaccaccaccatggagccgggcggcgatggattccaccgcgacacaaagggctggtcaatccaacccccggccaaggccagccgatagggcaggtttccccaaggtggtgttggtgtggccccaccggcaggcccggcggcatggcaaaagttggattgggagctgcccatccgttaatacaaatcccgtacggtgtcctcaccggcctggcgtttccggtattgatcctcaatccacttgtaagtggttttcaacccctcgcgcagcggtatggaaggctcccatcccagcatttgtttgatgaaagtattatcgctgttgcgccccgccacgccgcgcggagcattgagatcgtaatgacgcttaagtttcacaccaccgatttcctccaccaacgaaacaaggtcattgatggaaatcatctcgctggttcccaagttgaccggagtggccttcagcgcatcggtgtgcatgatcatgtcaatccccaggacacaatcatcaatgtacatgaagctgcgtgtctggttgccgtcgccccaaatttcaatctccagctttcccgtggccttggcctcgatgaccttgcgacaaatggccgccggcgccttttcacgtccaccatcccacgtgccccatggcccgtacacattgtggaaacgcgcaatgaacgtcgccagcccccgctcggcggtgtactcctggcaaaacatctccgacatgagtttttcccacccgtacccccgctccgccatggccggataagcatccgactctttcagcgcacggcagttgggatccttctgcaattcggtgttgtacgcgcaggcggagctcgaaaaaaaataccgccgcactcccgcccgccaggcatgttcaatcaaatgcgtgttaatcaaaatgctgcgcagacattccacgcgaaaccgctcaataaaacccattccacccatgtccgcagcgagattgtacacttccgcagccccttccacggcgcggcggcaattttcctcaaccttgaggtccaagctcaattcctccaccccgggaacccgctggtaccaatgcggcagcggcttccgatccaccgcccgaatccgctgataacccaagtctttgaagtatcgcaccagcgcgcccccaataaacccaccggcacccgtgacaacaatcaattcatccttggcggcacggttttccatccacggacgttcagttttcgcacaaggggctgagctggcatcagttttggtttgtgtttgcatagcctgtatccattcaaaagccgcgccaaactatcattgctcctccccgcttggcaatgaaggagatttcctcctttcgttcacaccgccgccctgctatccctctgatggcatggttgcgcgcgtgacacttgaaatcgccctgcgcaaagagttcgactacctcatccccgccgacttggaaccattggtcgaaatcggcacgcgggtgaaggtcccctttggcggacgcgaagtctcaggctgcgtcacagcgttgctcgatcaatcctcccacccacgcctcaaacctatcatcaaaatcctcggctcccccagcctggtcacccccaaagtgctggcgttggcccgatggattgccgagtactattgctgcgcaccggaagtcgccttgcgctccgttttgcccgaggccgttcgccgtgaaaaagcgggatggcgcgagcgcctctgggtccgtgtcatcccccgcttgggcgaaatgcccaaattaactgcgcgccaggaggaagtctggcgcgtcgtggaagaaatgcgcgccctgccaatgcaaaaattggcagccttgaccggcgccacacctcaaaccatccgccgtcttgaagacaaaggtttgattaccatttcacccgaagtggacgaacgcgacccctatgccaccgaactgattctgcccacccaacccctccccttgaacgccgagcaggcgcgggccttggaagccatcacccgctccatgggccagcccggccaaccgcccccggacaaacccacagtctttctgttgcacggcgttacgggcagcggcaaaaccgaagtttatttacaagccatcgcttacgccctcagccagggccgcggtgccatcgttctggtgccggaaatctcgctgacgccgcaaaccgtcgagcgtttcaaggcccgcttcagcagcggcccacatcaaactctcgtggccgtcctccacagccacctctccgcgggtgagcggcatgacgaatggcataagatccgccagggccgcgcccgcatcgtcatcggcgcgcgctcggccatctttgctcccgtcgagcctctcggcctcatcatcgtagatgaagagcacgaacactcctacaaacaggaggaagcccctcgttaccacgcccgcgatgtggccgtcgtgcgcggaagccgcgaaaacgccgtcgtcgtactcggctccgccacgccatccctggaaagtttctacaatgcacgccgcggcaaatacgtcctcctggagctgccccaccgcgccgacaacaaaaaaatgccggtggtccgcgtcgtggacatgcgggccgagctccgccgcgaacgcggacagctccaggtcttttcacaatcgttgcgcgatgccatcctgcggcgcctcgaacgccacgagcaaatcatcctcttcctcaaccgccgcggttacgccaccgccctggagtgcccccaatgtggctacgtcgcccaatgtccccattgcagcgtggccctcacctaccaccgcccacaagcccaactccgctgtcacatctgcggttacaacgccgaagctcccacggcctgccccaacgcacaatgccgcaaccccgccattcgcttcgcaggcctgggaacccaaaaagtggagcacgtcctcgctcgcctcttccccaccgcccgcatttgccgcatggactccgacgtcctccaaagaaaagaggactaccggcgaatcctcggaaacttcaaggccggcaaaattgacatcctggtcggcacccaaatgattgccaagggcctgcacttcgaaaacgtaactttggttggcgtcgttcatgccgacatgggattgcacctgcccgacttccgcgccggtgaacgcacttttcaattattgactcaggtggcaggccgcgccggacgcggcgaagtcgaaggcgaagttttcgttcaatccttcaccccctttcatcccgccattcaatatgcgcgccgccatgattttgcgggtttcttcgagcaggagctcgagttccgccaacaactgcgctaccccccctttacacgcatggcccggttgctttggcgcggacgcaacgaagaaaaagtggccttttttgcagagcaatgccgcaaaaagctcgaagcgttgactcaagagctccccgacttgatggtggccggcccagccgccgcacccctggcgcgagcggagactttttaccgttaccatctgacgcttcgcacccgccaaatgaccaagctcagctccgccctggcaacgttgttgccaaccatgcccttgcccgaagacgtaagccttgtcgtggacgtggaccccgtcacgttgctttgactcaccttctttaactcacagctcacctcttgggcaaccggtcgaaagcctccagcgccacctcccgcgcaatggcatggttgacaatcggatgaggataagtccgccccaattccacaccggcctgcttcagaacatcagcaggcgcctcccatggccggtgaatccatgtctccggcagaccggcgagctccggcacccaccggcgaacatacgcgccacccgcatcaaatttttccccttgggacacaggattgaacacacggaaatagggcgccgcatccgcgccgcaacccgccacccattgccatcccagcgtgttgctcgccaaatcggcatccaccagcgtgtcccaaaaccatcgtgctccgtgccgccaatccaccaaaagatccttcaccaaaaacgatcccacaatcatccgcacacgattatgcatccatcccgtagcccacaattcccgcaaacccgcatccacaatcggataacccgtccgccccttctgccacgcccgcaaaacctccccaacatcctcccgccacggaaattttttgaagttgggccgcaacggctcctccggtgtatggggaaaatgccacagcaaatgatacgcaaactctcgccaccccagttccgtcataaacggcgaatgaagccacgccgcatccgcgggacgctgcgcctccgcccaccgacgcaaccgctgcccgatttggcgcgggctgatttccccaaaatgcaaatgcggcgaaagccgcgaagtccccacctctgccggcaaatttcgtccctcggcatatcgcacaaatgccgactgcaaaaaccgctccaactgccgctccgccccctccggcccgggctgccacgtagcgcgcaatccaccggcccaatccaccttgggctccaattccaactcttccaacgcaaccgatttcggccaccccttgggcgcaggcaattgctctggcgccggcagcggctcggaaaaaagtgtcgcttgcgtcaaacaatgtttccagaaaggcgtgaacacttgaaaaggttgcccgctccggtttttcaccgtccacggctccaacaacaaagcagcattccagctctccacctccaccccttgagcacgcaacgtttccttgatgcccttgtcccgcttgatgatcgcaggctcataacgccgattccaataaaccgcatcagcgcccgtttccttgatcaacgcttgcaaggtggccaagctcccccctctccgtatcacaagcccactgccccggcggcgcagtccatcctccaaagctcgcaacgatggatgcagccaccatttcgacgcaccccccggcggccaatctccctcttcctcaggcgcccaaataaaaactggaatgaccggctgcccccgtcgggccgccgcgtgcaaagccggctgatcttcccaacgcaaatccagccgaaaccaaaccaaggtggcactcatgatttcccctaaacaccaagccaatggataattaacaaacgccggttggatacccgcccatttcaaaaacagttcccacgaaataatactagtgcctcaacgtcgcttttccaaaccacgcccccgttgtatgagcagctcgcggctgtcgggcggcacgtcatatttctgtgtctctccccacggccaccgcacttccactgcttgagtgtccgccggcaataacaacaccgcgctgtcctgtgaataccatcccccgcccgcatgaacttcccataccggccccgccgcattttgacgccacgcacgcacctgcgccccaacacctgtcggattcatcggccccgccgataggcgcactcgcaaaccaggccgtgcactgacgttccgataaagccgcgtttccgccccgttctgagtcacggccaaatccacccgcccatccccgtcaaaatcagccaccgctgcgccacgctgttcaccatacactttcacgccggtccgtgtgccctcagccggttccagttttccctcgcccgtgttgcgcaaccacaaaccgcggccggcatccaatcgcgtaacccccgcctgcgtggcaaaaaagttctgactcaaaaaaacatctggccatccgtccccgtccatatctgccgcgcagacactccacaccggcgcccattgagccatcggtggcaacggcgcaacttcccagcgttgggcccgattgaggaaacgatgcgtctcaagcgtcaccgctttgagctcatgcgccgtcttgaatttttccccaagcaaatcagccacagtggccttggcgtacaaggcatgcttgggatacttaggcgcaagaaaaggcagccccactttgttatccgtcaacggcctcctcggcaccacccgcccgggtgtcagctcctcgtaagcctccaacaaatccacctgtcccaaaccattgaaatcgccgtaataaagccgcgcaggaaactttggcgaagcctggtagtggctgttaagcccccaatttccagctacaagatcaagccgcccgtccccatccaaatccaccgccgccaaacccgtccaccatcccgtccatccctccaaccccagctcccgcgtcacttccttgaatgtgccctgttcattgaagaaaacccgcaccggcccccactcacaactcaccgccaaatccggacgcccgtcttgattgaaatccgcaaatatcgccgccgtcaccaaaccaagctttcggaaaaccgccgcatgacgtgcatccgctttgagcaccccttgctcattcaagtacaattgcgaatccaccggctcaggatatcgcccgggggaaacacgcccccccatgaacacatccaaatctccatcgccgtccacatccgccgcagccaacggccccacactttgccctttttccgcaggcaagacggtggaggcccccccttgcacagcaatcagagccttgctgccctgccccggctccaactcccaactggacatccccaccaccagcgcccgctgtgtcggcgcaagctggatgcccaacagcgacgtcgtatcctggttttggattccgcccatgtccggcaacagcgtccacccccctttaccgtcattccggtaaatgctgattttccctccagcgcccgtacccacaatcagatcatcccaaccatccccatcccaatcataccacgtcacccccggcccggattgactcagacggttgggcaaaagcggctgccgcgcaaaatcatcgtaagccacttcatgatgacgatgccccagtttctccgaaacatcctcaaacatcaacgccggcggcgcagcccgtggtggcgccggatttgccacggcgctggattgggcaatttcataaacccgattgggacgcgcatccgcaatcaccgaccgctgtcccccgggccacaccacttccacagtcagacgctcagccgagcccgccgcaaatgtgcggaccgtatcatcacatccgagataacgccccccggccaacatctcctgaaactgcatcggcaccgctccgccacgcaccgttacccttgcattgatgccataggtattgggcgcaagcccgcgcaaacgcaccgccacccgcggcgccggacaattgttccgataaaccagtgccggcgcattcaaacaattcaccaccacatccaaatccccatcgttgtccaaatccgccatcgctatcccatgcgaaatctcttcggcatgaaatccccattgcctccccacttcttcgaaccgcaggttaccaagattccggtaggcgtaattcggacttaaatacggtggtatttccagtagccgcgcccgaaattcctgcaggttgcgctcctgcgaaactgtccccgctgcatcgagcatgtccatgtcattcacattgtgggagtagccggtggtcaccaaaatgtcctcaaacccatccaaatccacatctaaaaacgccggcacccatgtccaatccgacgccgccacctgcgccgcatacgccaattccgcataggtgccatcaccccggttccattgcaaaacattgcgcgttgtcagtatccggttttcaatcgcacccacaggcggatggacaaatttcatgccggtaagctggcgcatcagacggtcatgcgtggtgggtttcatctccgtacagaacaaatccagcaacccatcccggtccaaatccccgaaatccatccccatgctcgcaaaacacatcgtccgcaccgccagccacggcaccgcccgaaacacccctcccccttgattcaaccaaaacctgtccggcgtgtgaaaatcattggccacatagatgtccacccgcccgtcgtcgttcaaatcacgcaactgcaccgtaaatccgtaatccatcaaattggtccggatcggctgcccattctcatcaagaaaccagttcgcccacgattgaaggacaaaacgtcccccgccttcgttgatgtacaaatcatcctgctcgcccacctcaatcaacatgttcccctcgattttcaatcgccgcgcccaacgccccgtgaccacaggacggccattcacataacgcaccgagtaattgcccccgccgcgaagtatggtctcctccccgtaattggccacatacaagtccaagtcgccgtccccatccaaatcccccaaactggcactcgtacccccgcgagtattcgtgaatcccgtatccgtcttctcggtaaaatgtccgcgaccgtcattcagaaaaagccgggcgccccgtccattgaatgtcacaataagatcaaggtccccatccccctccacatccgcaaagacagccccgcggctcaactggttcaccagccccaacccgctgctcgccgtcacatcttcaaatcgccagcctcccaagttgcgatacagggtattggtgccattaaggctgcacaggtaaatgtcacaccacccatccccatccacatcccccaaggccagccccgaaccattgatcaaattggcatttcgggcgtcactttcgggagtaagcaggttgacaaatgcgatgctggtttgttggggcggcatccgggtaaatccggcggagaaatttgtggcaaaagacaaatcgcgatacttgtaaccgttggcgactttccagtccaatgccggagcacccatcaggccatcgctgaccagaaggcaacacgccaacatcgcccattgtccggccttcccggcagaaagccgccgattgcgcaccattttttgcatcattacgggtaagtagcgcccgcaaatatgcccaatcgcaagggaaagacaatgagatttggtctctttccacgcacaaattcactgttttccgcaaaaacgcccccttcaaggggccaccgtcagaccagagggagccctcaagcggtagccatcggaaaacgtcaccgtcaacggcgtggtttgaaaattataaaccgcatacgtcttgcgcccctccttgcggtacacattgaaaaaaggataatccgccgtcactcccgtgtcattgagccccaaacggtcaagggtgtgaatccattgatacataaaggcgcgggtattgccgctttcaattttgttttccgggtgcgcctccaaatacgcagcagcagccgccggctccgccaacgcgcggaacatcaacaccaaatccccccaacccgtgttgtaatcgctcccccctttgcgccgcgccacaatccgatcatggttctttttcacatacgccggagaccgccccatataaacactggccggcgtaaacggcaaccagttgatgccgtgaatgcaatctatgtccccggaaaaccacgtggcaaatgcccctttgccgccccacaccatccccaacgccacctccggaaaatcctttggaaaattcgtgcccgccacgtcaaaccagtattcctccaccgcagtccgctcgatattgaacaaggccaaacccgtatcccgcaaagcacgattgccggtggcctccccccacaacatcactccataccacgcattgagcgactcactcgatgactcctgattgttgccatcggcaaaattcgcatcgcccgatgcccacgagtgccccgcgtatttgtcaaaacaacgcaaataaggaaacatggcatcccgcctgtcggtcgcggcaatgtcacgaatcaacatttccaccatcggcccccaacgccgcgcccaccccgcatccttccgggccacctccgctgccgcgcggatgaaatagccgtaatgaaaatgatgatcattcagtggtaaatcgcttccgtaagatggccggctcccaaccagcgttccccaacgtgcattgtaatagaataccacctgctccttcccgggcatagcgctaaaccattgctccaaacgccgcttgagctcgccaagaaagacctcctgcaattccggcgcccccgcagcctccgccaccccgctcaaagtcgccagcttgccaaggtgcttcccctcccaataagtatccccaaacccggccggtttcttgccggcctcagcccgcaaaagctccaccgccttctcgcggctggccagcccctgcccgggtaaaaacggcagcaatccctgcacgggtatctgcgtggtaaatccagccccctcgcccactttcatcaatccccgtaccgaattgtagctgagctccgtcaacggactgcgcacatatttccactgatgcggatacaaggcaaaaatcgtccccacgtcagccccctcctgcggtttgaacgcataccggtaagtcgcgcgcacattcccgccttcatgcacatactccaaccgcgtatccaccacgtggttgtgggcaaacctggcaaaacgcgccaacgtctccggcttgtcatccggcaaaaccgccaccgtaaaatacgttttgcctccggcaaaattggtccaacttcgcccctccaatcccgcccaagtcgagcctcccggaccaaaaagcccgtaatgatgaccattcaccgtgatccccagcgttgcctcccgccccgtgccgctccacaaccgcggcgtctgcgaaaatgtcaccaccggctgcccatcgctataaacacaatagacatacggactgccatgcccaaagctcgtgcgcaaccgcgccttgttggtctcaaaaacaacgctcacaaaccaatccgaccaccccccgcacaacgcctcgggaaaattcgccgcagccgagtgccccaacattaaatcgccctgccttccgccgccgctgccaaaaatccccgccgaggttgcgctcaccctggccccatgctggcttattgccagtccgttggaggtacaacgcagcaccaacggatgcgcaaaaagattctgcgaatacggctgccacaccaaagaactccaccactgccctgtaatcatcgggcctcgcaaatcctccgtgcgatatatccgctccggcagtgccttgcagggacgcggcgccgaactgaggtaacctccctcacccactttgatgaccgccgacccgtcgggcgtcgccgaaaaacctggagcccctcccaccaaaagcactacccaccccaacaatccaaaacgcatcacacgcagcagactgcccccatggtgaatcataaaacagcggatgttcatggcgcctacctttaagaatttcggcgccatttgtccaaacaaaccaaaaaagccagcggcccacctcccccccgaagacctcaaccgccctgctcagccctcagccaccggccacaatcttgactatctccagcctgtcgccctcctgcaaccgccgctgcccaaactccgagggcgcaagcgcctccccgttcaactccaccaccacactgcgcggatagaacttttgggccaccaaaaactcttccaccgtgcagggaagcacggcctccacagactgtccattggcaataacttgaggcatggcccactcacacccccgccagcgcctccgcaggcgcagcggcaatttcatccatcgtcaaatagcaacccggatcttccgcccacggatccccaaatacctgctcggcacgcacccggaatccgcccccgcaaatctcctgaaaacggcaaatcccgcaccgtcccttgagcaaaggccgccgattccgcaaaccattcagaatcggatgatccgttcgtgtccaaatcttgctaaacggcgtctccttcacattccccaaggttaccgactgccaaaactggtccggatgaacattcccctgcgtgtcaatattcccaatccctacccccgaactgttcgcgccgccgccgttccacttcaacaaatcataaacttccttggcccgcggcgattgctcccgcaagagccgaagataaagaaacgcattatccgccggctggtccaccgtcagcacctcccgcgtctttccgttctgattccattgcatcgtgcggtcaatgatccggtcaatcgccgcccgtgtccgggccggcggcacactcacaaggttggctccccgcccgctgtacaccaaatggtaaaaacaaacccggtcaatgttctcaaattcaatgaaatccaagatgcgctccaaatcatccaccgtgttgcgcgtcagcgtcaatcgcagccccaccttttgccccaccgccttgcaattccgaaacgcctctatcgtcttttcaaacgcccctttcttgccacggaaataatcatgtgtatccccaatgccatcgagcgaaatccccacgtaggaaaaacccagttccttgatttttttcgctgtggacaggtcaatcaacgtcccgttggtcgaaagcgtcaatcgcagtcccttctgcacggccctcgaagctagatcaaaaaagtgcggatgtatcaacggctccccacccgacaacaaaaccgccggcaccttgaactccgccaaatcatcaatcaccgcgttgcattgctccaacgtcaattccccgggatacacctgtgccgtggaatccgaatagcaatgaatgcaattcagattgcaccgccgcgtaatgttccaaaccactatcggccgccgctcagacgcagaacgcggggccccgtggccctggccatatcgaaggtgatcggcgggctgggccacgccacaatacaaacgtgtcagattcagcatggtactaaaatactagacttcaacagtgccctccttacgaggccgcaggcgcaggcgcagccgcaggatggtattgcggtgaaacgtaggcgcacaacggctcctccccaagataatcgccggtcagcgcataagcacgagcgcgcgagccgccgcaaatgtccttgtactcgcacaccccacatttgcccttcaaaagactggaattgcgcagattgcggaacacttcatgattccggtacacctcaatcaattcatccgtacgcgcattcccgcccgtaatcggcaaaaatccgctgggctgaatctccccaatgtgggagacaaaaacaaaccccttcccatcattgatgccaatcggagcgcgctttttcagggccttctcgtcatgcaattgctgcaacaccacccgccggtagtgatgcccctcggttgtcttgatgtcgtacggcacccgcgtggacaaatgcgccagcttgacgaacaactcctccatctcaaacgcattcaacaaatccgccaccttcccccgccccgtcggcacaagctgaaatacactccacaacaccggcttgatttcctcaagcagcttcacaaatccgtcaaactccctgaagttttgcttcgtaaaggtcgtgttcacctggacttctatcccagcctcacgaatgttctgcagcgcctgcatcgtcatgtcccacgtccccttgatcccgcggaaacgatcgtggctctcacgattggccccatcaatgctgatggaaatgcgcgcacaacccgcctccttcagccgcttcaaatcggcctgcaaaaacagcggcgtcacactcgggctcaacgccacccgcaaccccttgcccgtcgcatacgccacaatgtcgtacaggtccggccgctgcatcggatcgccacccgtcaaaataaaaatcgccggacgcgcccgcaccacctgatccacaaaacgatacgcctcctcaccatccaactcctgcgggtgacggtggaccttggccgccgcacggcaatgccggcacaccaacgcgcaggcgcgggtcatttcccataccaccaaaaacgggtggtcgttaaaatcaaacatcggttgaccgagcatcggtatcatatctacttcgtcggccgccaaacggccatgactcacatcaagcttaacgccgaatagtttcgcgtgcaatgaaatgagtcgaattcgccaaaaaatggtcagccacctcatcccctgcttctaacaccccccacaagaggccagatggagaagtgaaaaaacataaaaaaaaatttttgacaaaccgagcaagcaagccatattaacgacagatttagtcgttattaggctaaaccaattaatatcaacgcatggccgaggggcttacggggccttcggctcatttaagtcgtctaatgacgacataattagtcgtatatgcagaacaacgccattgagccaaagctctcgccaaacgaggctctcaaagcctcttcccccaccctcgcaggcacgttggcccaaaccttggccgaccctcaagccgaccatttctccgaggaagatgcccaattcctcaaattccacggttcctatcaacaagacgaccgcgacctccgaaagcagggcaaaaaatttattttcatggtgcgtgtacggatgcccggcggcgttttgaaacccgagcaatacgtcgcactcgacaagctggccaccgattacggcaacgattccctccgcgtcacctcacgccagggcatccaatttcatggcatcattaaaaccggccttgcccgcaccattcgcggcatcaacgaagtcatgttgaccaccctcgccgcttgcggcgatgtcgtgcgcaacgtcgtaacaccgccgccggtgctgcacggtttggtcggcgagcaggtcctggacgatgcccggctgctctccaaatctctcttgccgcagactccggcttaccatgaaatttggctcaacggagaaaagctccaactggaatccgaagccgcaaagaactttgaagaccctctctatggcaaaacctatttgccacggaaattcaaaatttcctttgccattccaccggtcaatgacgtggacatctttgcccaatgccttggcttcattgccatccaagaggacggcaaggtcagcggttacaatgtcgtggccggcggcggcatgggccgctcgcatggcaaccaccagactttcccaagactggccgatttaatcggctacattccccgtgaggcggtggaagccacggcctgggcagtcgtcggcatccatcgggatttcggcgaccgcgccaaccgaaagcatgcccggttgaaatacgttctcgctgatcgcggcgtggactggttccgtcaacaattggagcaacgcctgggcttcgcactggaaccggcacgccccttcgtcttcacccgccagggagacctctacggatggcggcaacaacccgacggcacttggattttgggcatgttcatcgagaccggccgcatccgtgatacagaatcgcgccgtttgaagacggccctgcgccaggtggtggagcaatttggattggaagtccacctcacccccgccaacaacctgctgcttgttggaattcaagacaacaaacgcgcagacgtgacccgagtgttggctgagcacggcgtggaccctgcccaacgtgtcagcgccgtgcggggcgcctccatggcctgcgtcgccctgcccacctgcggcctggccttggcggaagcagagcgttttctcccccaattgatgacgcacattgaagaagccatgcaagaaacaggcctggccaacgatgaaatcatcatccgcatgaccggctgccccaacggctgcgcccggccgtacatggcggagattgccctggtgggcaaggcgccgggacgctaccagctttttgtcggcggcaatcccgccggcacccgcttgaaccgtgtgtacaaagacacggtcaaagaaactgaaatcgttgccgaactaaaatccctgttcgagcgttaccgccgggaacgcctggccaacgaacgtttcggcgacttcgcagcacgagtcttgtggcttgagaacgccgctcaaaacaatcaagcgcccgcggtggtgggctaacccatttcgaccatgttaaccgaagtagaaataaaaaactggaacgaccactggaagggcaagccagtccaagaactggccgagtgggccatcgtcttgggacgcggacgcgcagtggtcaccaccaatttccgcccttacgaggccgtgctgttgcatctgctcacgcgtatccagccggacatccccgtcatttgggtggaccacggctggaatcgccccgccacttatcgccatgctgaagatgtaacacgccgcttgaagctcaatttgaaagtgtacacccccaccatgaccgtcgcccgctatcaggccctgtacggcgacccgccccaccccgaccaggaggaggccctgcgccaattcagccaaatcttcaagctggaaccctttcaacgcgccatgcgcgaaatggctcccctcgtctggctgacagcgctccgccgtcaacaaaacccgcatcgcgccggcatggatgccatctcactcgatgccaatacggggcttttgaaaatcagccccctcctggaatggacggattcagaaatggacgactacctcaaaaaacacgatttaccggtggaatgggattacttcgacccggccaaaggggaagaaaaacgtgaatgtggcctgcatgtccggtgggaccacgcccaaacggggcgttaaacctcccgctcattccttgaagacactcggcccatacacagcaagcacatcgttaaaccctgcacccaaacttttcgatccatgaccagctatcacttggaccatttgcaacacctggaaacggaggccatccatgtcatgcgtgaggtggccgccgagttcgagcgcccatgcctcctcttctccggcggcaaggactccatatgcctgcttcgcctcgcagaaaaggccttccgcccttccgacatccccatgcccctcctcaatgtggacaccggccatcactttccggaattgaacgaattccgtgaccgccgcgcccaggaattgggagccaaactcatcgtccgtaaagtcgaagacgccatcgctcaaggtctggccacgcccgcccccggcgaaatcagccgcaataaactccaaatccctacccttctggccgccatcgaagaattccgtttcgatgcctgcatcggcggcgcacgccgcgacgaggaaaaagcacgcgccaaagagcgtttcttcagcttccgcgatgccttcggccaatgggaccccaaaaaccagcggcccgaaatctggaatctttacaacgcacgcgtcaacccgggcgagcacatgcgcgtctttccgctcagcaactggaccgaactcgacgtctggcaatacatccgtcgcgagcgcctggaagtgccctccatttatttcagccaccgccgcctctgcgtccgccgcaacggccaatggctgcccgtaaatgatttcttgcccccgcgccccaacgaagaagtgcgcgagctcgtcgtgcgcgtccgcaccatcggcgacatcatcagcacgggcatgattgaatcccgtgctgacagcctcgaagacatcatcgccgaaatcagcgccgcgcgcgtcacagagcgcggctcccgcgccgacgataaaacctccgaagccgccatggaggaccgcaaaaaagcaggctatttttaagggttaaccaagggactgaacatgcaaacctcattgtcaacagaacccaaaagcgccattgccatcggccactccgccgaacactcacgccccgcgggacacgccgtcgaaatcctccgcttcaacacctgcggctcggtggatgacggaaaatccaccttgatcggccggctgctctacgattccaaatccttgatggaagaccagctcgaatccctcgagcgttccgccgaaattaccggcggcggtcaaatcaacctggccaacctgaccgacggcctccgcgccgaacgcgagcaaggcatcaccattgatgtcgcctatcgctacttcgccacaccccgccgcaagttcatcgtcgccgacacgcccggccatgtccaatacacccgcaacatggtcaccggcgcttccacagccaacctctccgtggtgttggtggatgcgcgtcagggcgtcaccgaacaaagccgccgccacaccttcatcgcgtccttgttgcgcatcccccacctcatcatcgccgtcaacaaaatggatttggtggactggtccgaggaccgtttcctcgaaatccgcgaggcctttgaggcattcctgccacgccttgacatcaaggacgtgaaattcatccccatcagcgccctcaacggcgacaacgtggtggagccctcccgccacaccccgtggtattgcggccccacccttttgggacacctcgaaaccgtccacatcgccagcgattacaacctcaacggcttccgactgcccgtccaatgggtcaaccgcccccaagccccccgggacccgcgctaccacgacttccgcggttacagcggccagattgcaggcggcattgtgcgggttggggaccccgtcctcgtgctccccgccggcctcaaaagccgcgtcaaagaaatctggacctacgacggctcactccacgaagccttttgcccgcaatccgtcaccgttttactggagcacgacattgatgtgagccgcggtgacatgctcgtgggctttgatcatctccccggaatggacaacgatgtcagggcccaagtctgctggatgaatcaccggccgctccaggccggccgcaaatacctcctcaagcataccacagccacggtccaggccgtcgtcaccgacattgaacaccggatgaacatcctcgcctttgaaccggagccggccaccgagcttgctttgaacgacattggccaggtccgtttgaaaacctcccgcccgctcgtctatgacggctacgccaccaaccggctcaccggcgctttcattttgatcgagcccggcaccaacgccaccgtggccgcaggcatgttgctcccgccccctcgggccatcaccccggaataccacgactttattatttaaaactaaggattgggcgcagtctcccgcagcggcagcgccccgggcacgttggaaaaatcaaaatccaccaccgcctccgcggcaagagtggccaccaccgatcgcaatttgaccacattgccaccggtggggtgattgcggttggcatacaacaggacaaaagtccgcgaaaacggatccacccacaggctggtgcccgtccaccccgtatgcccatacgacccaatcggaaacaccttgccccgcggccctgcataaggcgaatcaatgtcccatcccaatccccggcgcgcactgccatccgccggcgattgcaccgacgtcatcaatttaatggtctcttctttcaaaacgcgccgcccatccaattcgcccccattcaaaagcatgcgacaaaaacgcgcagtgtcggccaccgtcgtaaaaagaccggcatgcccagccacgccccccatccgtcgtgccgtcgggtcatgcaccacgccgcgcaacaccactccccccacccgttcagtcggcgcaatttcccttttccattcctccggcggcaaaaaccgcgtctgcttcatccccagcggctcgtaaaatttttcgcgcgccaagtccgcaagagattttccggaaacccgccgcacgatttcaccaagcaggatgaaattgacatcgctatagcgaaacaccttgcctggagccggattcggccgctcgctcactgcctgagcaatcgcgcccgtgtaaccgttgaaatcacggcgcgtcaaccccgacggcaaccccgagtaatgggtcagcaacagtcgcaccgtgatcgcctcccgcccttgtccgacaaattccggcaagtatttggacaccggctcatccagcccaattttgccctgttcccacagccacatcacgcagggcgttgtggccatcaccttggtcaacgaggccgcatcaaaaatggtgttggtggtcatcggctccggcgcaggaatcacggcccgctgcccgtaagccttgatgtacgccgtgccctgccgttcaatccatacaaccgctccgggagtgtcaccgttggtaatggccgccgtgatggcctggtccagttcaacaagtttctccgcgcgaaaaacttttcccgacccttccgccgctggcgcaacaggcgtgctcaacacccagagcaggccgaacagaagttgaagaaaagcccgccggctcaggcttggttgcgccttttgctcatggtttgaaatcggcatcattcaatagattagatgttacgcagcctgaataagttaccatttttcaagctgttggagctccttcgcccaagccgccttcaatccccctccccctcgtcctccccggctccgccgttgccgctgccggcattgtactcgtgcaacttgttgcgcaacgtgcgcacactgatccccagcagcttcgccgcgtgggtccggttgccgccgcacttttccaacgcggccaaaatgtgtcgcttctccagctcggccagcggcaccacttcaggagtggtggctgcagcagccgatgttggggcaggagccgctgccgctgcggcgggagaaggctccacggatgctggcgttgcgctcaacgccgacgtccgcatcaaccccaaatgctccggctcaatcatcccgctgtccccgcacagaatgacggcccgctcaatgacattctgcaactcacgcacattccccggccaatcatgctccatcaaggcggactcgctggccggggacagtcccgcaagtttcacaccgtgcttgcgcatgaagcgttgcatgaaatgccgggacagcagcaggatgtcctccttcctctgccgcaacggcggcacaagcaccggaaccacattcaaacggaaaaacaaatcctgccggaactccttgcgggcaacactttgctcaagatgccggttggtggtggcaatgacccttacatccacccgcaccgtgcggttgccgccaacccgctcaaactcacgctcctgcaaaacccgcagtagcttggcctgcaccgccggcgatatttcgctgatttcatccaaaagaatcgtgcccccatgcgccagctcaaaacgtccctcacgcttgctcaacgcccccgtaaaggcccccttttcatgcccgaaaaactcgctctcaatcaggttttccggtatcgccgcgcagttgaccttgatgaacggcgcgccgttgcgtggactttgctgatgcaacgctcgcgccaccaattccttgcccgtcccgctctcaccctgaatcagcacggtggcctccgtgcgcgccacccgccggatgagctgccgcaaatcctccatcgccttgctctgccccaaaagctgcgacgcatcctcatcctccgcctgccggccgtaaaattggttgacccgcagcaactgggtgaactctgcagccttccgaatcaccacctccaactgctccgcgctgaacggcttgataagataatcaaacgccccggccttcatgcactccaccgccgattccaccgtggcgaagcccgaaatcatcaccaccaaaggccgcacgggacgggtgttgagccgcttgagcaaatcagtggcatctccatcgggaaggcggatgtccgcgatcaacaagtcgaaattgtcccgcgccagataatcctccgccgccgctatggtttccaccgcggccacgtcataccgacgtgaacgaagctgctgctcgaggtttttgcggacaatcaggtcgtcttcgagaacgatgattttctcgatcggcatgaggccattatatcaagcgacctggtgtcggcgatataattctgaaacgtacccctgcccggataccggcggcggcgtgggccagtgttgcggcggcaccaaccccaaacgcaaccgcgcttgttgattctcgcggtccaacgtcaaaagccgcaacaccagcccctgagtctcttccaacagcgcccgcagctccggagacatcaagcgcctttcctccggctttttctcccatgcctgcctctgctcccgcaggtgccgcgtgacttcctccagccggggcagcaattgccgccgcaccgcatcggctctcgccaacgcctcaacatcgccgttttgcaacccaccggcctctgtctcaaaagccgccagcaattcccggcacaattgccggtgttcctgcaaattttgaacaaccgcttccatcatgaagggggcactggagtggacatttccggtggcgtctgactggcatttcccttgggcagggaccgcgtcggcagcatgtgctccgcctgagaacgccattgcaaaaattgaatccgccattgcgccatttccatcaacgccttcaaccccggcgtcggcgtgtcgctcattttacccgccagcgccactacctgttgataataatcacgcgcccgctccggctgtttcatgtgctcgtacaccagcccgatttgatacagcactggcccctgccatcggggcgacggatccaaattcaaaaggctcaagtaaatttccagcgcattcagaaaatcgccctcttgatacaattggttggccagctcgtttcccgtccgctgctgccaataggcccagttctgcgggtttttcgctgcatcccgccgctgcttctccaacagcgccaaggtctgctgcaacgcctcccgattccgccccaaacgcttgagcgaagtggccagcaaaaaccgcacttccgcttcatcaccgcttcccccgtacttctgcaggtactcctgcgcctgcgccaccagcgtctcgtgctgccccagatttgccaggcacttcaaataacgaaaatgcatccgctccttgttcaactcctgcgaatccaatcgcaataatcgcgcataaaactccgaggcttcagcatactgcccgcgcccaaaataagtctcggcaatttccgtctgcgccaacaacaccagccgctggtaatattcaaattgatcgagccgcaacgacaacgcactcgacagcaccgcgtaaaatttactcaaggccagcgctcccacacccatctcccgatagagaataccctgccgcaacaatatctccggcaccgccgggtcatcgtggtaacgcttgacgtactgggagaaaatctgctgcgcgcgccccagttgtccctcctgttgggccaccagcgccaactcaaacaaggctggccgtttcaactcctccggcgcgtcggactccaaaatcccaatcaaaacagccgccgcctgccggtgatcccgcatcttccgcaattcccgccccgcctccaactgctcctgaaactggcgcacccgaaagacatggttggaagtctgcaacttcaccgtcagcaaattgctgcttgttatctgcccgggtgccggtgggttggtcaatgttccagctccccagcccggcggcccagctttgatcagccgcttgacataatcatcaatcaaaccggctgccgggctgttggtgacgacttttaagttttcattcgtgccggccaccgacgaaggaggggccgaagtcgtcactgccgtcggcgcattggatgcctgcgagcctgagccccataaatgagcattcacccccgccatcccaaacaccgcagccaaaatccacccccaccatcgcaaacgatggcctgaaaaatagccccccctgatgtctgataaatccctcatggcgaagacggctttttaggttcaggggtttcgtaacgggccgagctgggcggaatgcgtgcaggttgcggtggctgaaacaatggcaaggtgacaattacccccgccgcattggtacttcccaccggcacaggtgttttgaaatattgcaccaacatctgcggagtgatttccggctccgaggaagactgcaccgctgaagccgccggcaacgtcacttgattggtggccacctccaccgaagcggccggcggctctgaaatcaccggcacttcattcgtggcaggcggcgccaccaccacaacattggttggcggaaccggcggcggcactggattcggcggaatgatttcggccgcggcccccgggccgcccaccgtgccgggaatagccgcctccgccgcagccaccggtgccgccttggacgcacgagcaggccgctcaaaccgcaatggtcccggccccaaatacggcaaataagccgctggcgccggccatatcgcagccacactcacggccactatgacccagcttcgtaacacaaaatcgcccagttcgttggctcttttccaagctccctcgcccctgcaaggcaggaagcccagtatctcggagaaattatcggcaggattcggtgaaaactttaatccaatttcactcctccaaaatttcccgccttcgagagaaagttttccctaatttttccatttttggcgtccaagttccatgcagaagtgcctgcacccgttaaggttgcaaccagccatattctcacctgacatcccgcccgcaaaaagctacactgcccgcacgatgcaaaccttggacaccttgggcattattgccggcaaccggaaccttcccctcacgttggcgcgggaagcacgggccgccggcatccggcggctggtggcagttgcctttgaaggtgagaccgaccccgccctcgcccaactggtggacgaaattgagtggctccgggttgggcaactgggacgaatggtcgacgcatttaccaagcgcggtgtccgccactgcgtcatggtgggccagattgccccccgcaacctcttcgatttacgccctgactggcgggccgcaaaactgctcctgcagctcaaagagcgcaacgcccacaccctcttcggtgccatcgccgatgaattggcccgcgagggtgtcaccctcatcgaggccaccccttggctccaatccctcatgcccgaccaaaatttccatgccggcccgcgcctgagcgacaatcaaaaagccgacatcgccttcggccatcggatggcgcaggaaatcgcccgcctcgacattggccaaacagtcgtcgtcaaaaatggcaccgtcctggcagtcgaaggctttgaaggcacagacgcctgcctggccagaggcggggatttggcgggcaaggacggtggggccgttgccgttaaagtggccaaggccaaccatgacttccgtttcgacatcccatgcgccggccccaaaacagtggaagtctgtgcccaacacggagtggccgtgctggcagtcgaagccggccgctccctcctgttggaccggactgaaatggaagccctggcaaaacagcgcaaggtgaccctcgtcgccgtgccacccacgccggccacaacataaactacggcgtaagcgccgtcttaaatcgaagtcgaggtctccaggaagccttgcaactgccgcaaccgtgtcggatgccgcatcttgcgcaacgctttggcctcaatttgccggatgcgctcgcgggtgaccttgaactgcttgcccacctcttccaacgtccgcgaataaccgtccaccaatccaaagcgcagctccaagaccttccgctcccgctccgtcaggctggccagcacgtcgttgaccttttccttcaacaaactgtaactggtcatgtccgatgggttctccgccgttttgtcctcgatgaaatccccaaaattggtgtcgtcactgtcccccaccggcgattgcagagagatgggttgctgggccatcttgagcaccgcacgcacccgctccaccggcatctgcatttcatcggcaatttcctccggcgtcggctcccgcccaaaatcctgcaccaactgcttctgcacccgcatcaatttattgatggtctcaatcatgtgcaccggaatgcgaatggtgcgcgcctgatcggcaatgctgcgggtgatcgcctgccgaatccaccacgtcgcatacgtgctgaacttgtaaccccggcgatactcgaatttctccaccgccttcatcaagcccatgttcccctcctgaatcaaatccaggaaggacaacccacggttggtgtactttttagcgatggatatgaccaagcgcaggttggcttccaccatctccgtcttggcctgcatcgccttgcgattgaaatgctgcaattgcttgaacgcctccaggtattcctcacaactcatccgcaccatctcctcaagcgcctgtttcttccggatttccgcctgaagaatggactgtatctgcggattcttcttttgagcctcaagctcctgaatcgtgcgcaaacacgtctggaatttgtccaccacgttttccgccacattggcgatttcctcgatcaccttctgcttgtaataaaacttgggaaaagtcgcctgaagcttcgcatcgagcttcttgaattccttcatcaacttttccttcttggcgggcgaggtcgcagccaccatttcccggtacttgtcatccacctcccgatccatcgccatcaccgttttaaccagccgccgtaaatccttgaggtgattttcccgtccctcaatctttttgtccacaatcacccggtcaaaccgttccttgggcggctcgctgatgagtttctccgccaaagccacgtgctccttggccgtaaagccaaagctgtacacgatccgcttgacctcgttttcagcgtcttcgattcgcttggatatttccacctcctgctcccgcgtcagcagcggcacctggcccatctgcttgaggtacatccgcaccgggtcatccaaaatgtccagccggtttttatcgtcgtcttcctccggctccggctgctttacccggtccacctccgcctgatctacaatctccacctcaagattccgaagcttggtgtagatgtcatccagctcctccggtgtcaccaccgaatcaggcagagcgtcattgatatcattataagtcaggtatccctgctcctgcgccaatcgcaccaattccttgaccttttccgccaggtcaatcgtctgcggttgcttgttgggatcctggttttcatccaccgcaacaggcgcagcttcctccatcgccgtcttcgcaatggattttgccgttttcacctcgcttttagccgcggccttggcaacagcctcgccgcctttcttcgtttgcaactgctctgcctttttgctctcagccgtttctttaaccttcaaagagccgggctttttatccttgttttccacttcggcaggcttgaaatccttcttcttcggtgggacgccatctttcggcttggcctgggcagaagcagacgctgccggtttggagcccttggcctgggaaggttgggcgtgggccttcacttccttattggacgataactttcccttgccagccttcgcggctggctttttcacctgaggttttgccatagatgcgttttagaactatcggctacaaattctcgttataataaatagccttatactttaacgcttttctgttgtgtagtcaatctttgcttcaaaatcaaactttgcccacccttgctgccctgttgaaggcgtaaggtaccacgtaaaaaacactacatttccacaaaacacgggcctgtcttccccccctcccctcgatatttccacccggttataatccatttgtaaccttttccgccaaaaatgctcttggtatagtgtttggaacgtaggcggccaaccaactgcatccgccgcctaaacgccactcatatctgtgggcatgaccgaaacggtccataccgaagtgttgccgctccattcgacggcggatttcaccgccgcagtggagaaagccgccgctttgcttcaggctggcgaagttgtagcggtccccaccgagacggtgtacggcctggcagctaatgccctcaacccacaagccgtagccgccatctacacagtcaagggccggccttcccgcaatcccatcatcgttcacgtggccgatgaaagcatggcccgccaatgtgtcgcctcctggcctcccgctgctgccgccttgtcccgtgccttctggcccggacctctgaccatcgtcctgcccaaggcagccatcatccccgacatagtaactgccgggggccccaccgttggcgtccgctggccgcaccatcctttcatgcaagctttgattcaacgttgcgcctttccactcgctgcccccagcgccaacctttccaatcgcgtttctcccaccaccgccacccatgtgcgccaacacttggaaggacgcatcccccttatcgtggacggcggcccctgccccgtcggaattgaatccaccgtggtggcccttaaaggtgatgtttggcgcatcctccggcccggcatcattcacaaggacgctctggccgccgtcttgggcaccggctctgctcatgaggccgcctcacacgatagcaaccgccctgctttggaaagccccggccttctgccgcgccactacgcccctcgcgcacaagtgttggtttgggcctgggaaaacgaagactccctgcttgcgcagattcgccgcatgggggcaaaaccggaggaaacttacgtcttggcgcactcctgtgcgccccgccaaaaggactggcttgaagtcagcgttgcaccgcgtgacccggaagcctatgcacgcgccctttacgcggaattgcaccgggcggatgctcacaatgcacggtggctggtggtggaacagctccccaccgatggcccatggcaggccatccatgaccgcctccgccgcgccgctcaacatgaagaaacttgaattttacgtcggttgttgattgccatgcctcaaccgcgttacgatgaattgacgttttgatgaaaaacttgcaagctcgaccaatgacacgactgggaatcatcgcaagcctggtggccgtcctcggcgccacggcctggggtcagaccaaccatctgacggaacgcgccatttctttggatgaatgtctggaaatggcattggaaaacaatttcacccttcgcattgagcgccacaacatcgagcaagcccgcttcgacctcaggcgctctcaaacagcctacgacccgcagcttttctttggcctcacccgggccagaaacaccggcctcaaccaaaacttcgatttattgggcaatcgctccgagaactcctcccaaaacacggtggacaccctcgaatacggagtcagcgggctggggcccatggggtttgaatactcggtgccagtgagattcacccgcagcttcggcgacggctacacgtacaacaccctcgatctcaacaccttcaccttcgtgccggtgggttacgacgagtacgctgcccgcttcaacatcgaaatgcgtcagccgttgctccgcaacttcgctgtggacaacgtccgccgcaccatccaggtcaaccgcaaactgctcaaaatgtccgagcaccagtacgaagcccgcctgatggaaatcatcaccttggtggaactggcatactatgaactgatcttcgcccgcgaaaacgtcaaagtccaggagaaggccctggaactggccgaaaaactcctcgataacaaccgcaagagtttcaatgtcggaagcatggccattctggaagtgcaccgcgccgaatctttggtcgccagcacccgcgccgacctcctggccgcccagcaattggtcaaagtgcaggaaaacgtgctgaaaaacctcatcaccaaagacctggccgagtggaaacaagtttccttgagacccaccgaatccctgatggccattccgcaagccctcgacgtgcgcgaaagctggcgcaccggtttgaccaaacgccccgacctcgcccagttgcgggtggacttggaacgccaggacattgacatccgttacttcaaaaaccagaccctccccaacctgaacctcgtcggttcttacggacgggatgccctcggaacgggctttgaaaacacttggtcagacctccatttccgcgacaaagccgtggactactattacggcgttgaactcagcttcccatggggccgtcgcgaggccaaataccgtctggcgcaggaaaaagaccagcgcctgcaaaaggaattagtcctccaaaaactccagcaggacatcctggtccaaattgacgatgccatcgaagccgttaaaaccagttatgaccgcatcgccgccacacgccaagccgctgattttgcccaaaaagtcctccaatccgaggaatccctcatgcgcgtcggcatgagcacctccttccaaatcctgcaataccagcgcgacctcaccgcagcccgcacccaggaagcccgcgccatcgcggattacaacaaggcattggctcgcctagcccaggcggaaggctccaccttggaacggcgcaaaatcaaattacaattcaaataaaaccgccccggaaacgcgaaggttaaaagcctctcttgcagtggctgctgctacctgctgccaattcgaaaccaaaagcactgcgggaaaacttcccgcaattacaccagcccctccaaaatcatcggcaaccgctccaagctgcggttaagccctgcccgcgcaatggccttggcactgtcggtttggttggggaacaacaaatgccatgccggcgtttcaaaccacgcttccgccgccacgctctggtaattcccgctggtcccgatttgggcatgccgcaacagcagatccgccacatgcaccgccgccacaatttgaatatgctggctggcgcgctcgggcgcatggtgaaaccgggccgactccaccatcacctgcggcagtcggtgttgctccaaatacaacccgcccaactccgcgtgatccatccccagcacctcaatttcaatcgcctgcaacggcgcttttgtctcggatgaacgccggtgaatctcggcaaaatgctgcggaaacaccgcggccatcacaattttgcccacatcgtgcaccaatcccgccacgtaatccgcctcgtcattgggcattcgcaccgccgacaacacttcccgcgccataatcgccgtgccaatgcaatgacgccaaaactcccgccatggaaattccgtgttgcccgccatcttctgaaaatcctcgatcaccggcgtcaccatcgccagttgccgtatttgcctcagccccagataaaaaaccgcctcctcaatgctgttgaccggcacattcagcccaaaataaaccgagttcaccaaccgcaacaaccgcgccgtcaaactagggtcccgccgaatcacctcgctgatttgcgccgtataactctgatcagccgccaacaactcccgcagcgcactgttgacagtgctcagcgatggcagacgcgggcaggaatgtaaccgcgccgtgatctgttgccggttcagcggcgtcagccggttcgtagtggccacttgactcatactcatcttccctatcggcagtcagaggaaccaactttaataaataataaaaaaagacctctggttaccctcccagcgtccgatttttagacctccacaatcaaacagccttgggtagatacacagaagccgcgcttgacggcctgccctgctttggttaccaaagcatcaccaatacagcacaatacattcgcgggccgggccggtttggcgtccctccccgccttggaaaatcacatgaatactgagaaaaaaggcctgtttgtcaccgccgacggcagaaacgtcgccttcacctttgcgctggtcagctcgttgtttctcctctggggattctgcaacgggatgattgacgtgatggacaaacatttccaaaacgagctcaaactcaccctcagccaatccgcctgggtccagtttgcccattacctcggctatttcatcatggccctgccggccggctggctggccatccggctcggttacaaaggcggcattatcgcaggcctcttgatggtggccgtagggggattgtggttcatcccggccacacacatcgccaagttctgggcctttttacttggcgtctgcaccatcgccgccggtctgaccttcctcgaaacggtggccaacccatataccaccgtcctcggcgacaaacgcttcgcagccactcgcatcaacctggctcagtcctgcaacggcgtcggctggatccttggccccatcgccggcggcctcttcttttacggtaccgatgaaacaggacgcagcaccggtgccgaaaccttgtggatcccttatgccggtgtggccgtggtggtcatcctcctggcggtgattttctttttcgcccccatgcccgacatcaataccgaggacgactatcacctcgacgataaaaacaatgacaaaaccaccgccattaaaccggcttcccgtgggctgacctacgggttgttactcgtgaatatcgccatcctgcttttggtgtttggaatgataacatggctcattctcagcgcgaccaaagttggcgaatccctcaaaggcctggccgctgccctgccgcatccttcctccttcaccatcaacgcagaccacgccttgaccgtcgtcctgttttgggcgggcgtcgccatcatgatcgtagcggccattgtcatggcccccatgaccaaaaaaatctcccaccacagcatctggtcccacccccatttctccggggccgtggcggcgcagtttctatacgtggccgcccaggcgggcatcttcagcttccttatcaattacgtgacctcagaagtcccggacctccccgcctcgtggcaccgcgacagcaccaaaaaatggattgaaatcaacacctccttcacacgcgatgacctcaaggatttgcctgcgctggcggctcgattgaaaaaccccaccgaccccgtgacagccatggtggccggcaaattgtcctccgacactcaggcagccctcgcagagtacgtccccgacaaaaccaaccccaaattgctcagtgtgcccttggtgcaggatttgaaaagcattgtccgcggcaccaacatctacaatccccagctcttcgctggtgtcaacctcagccccgccacccgcgaaatcctggccctccctgaaaaagaacgaaacacacccctcctcaaccgcctgctccttacagacgcctttgccggtttacttaattataccccaggccgttattgcatcagtgacgccggcgcttccaacctcgcctctttcggattcttctgcttcttggtgggccgcttcaccggagcctggctgctgaaacgtttctccgcccaccgcatgttgggcctctacggcctcatgaacgtgctggtctgcctgctggtgttcttcaagctcggctggctgtccgtggtgtgcgtcttcctcagctatttcttcatgtccatcatgttccccaccatctttgcactggggattttcggcttgggcgtccgtgccaagcgcgcctcggcttacatcgtcatggccatcatgggcggtgccatcctgcccaaactcatggggtacgttgctgaccaaaccaacatgtcccgcggtttcatcgtgccgatgatttgcttcgtggccattgccctttacggcttcggttggagccgcctcagccaggccgaatccttaagcggcctgaaaaccaccgccggccactaaaaacaaggctcccattcttgcaccacccccctgcgctggggccggggctcgtcttgtcttcaaccaatccgcgctcacactttctccggcaccacaaacggcggacggtactcgcgccgaagcagccgatccgcctccggattgttcacaaacttttccttgtcggcatcaaacatcaacttgggccccacccacaacgtcgccttctgcgggtccacaccaatcgccttggtgttttccaaagtcgtcatgatgctctcgcccaccacctcgttatcgctgaaatccttcggcttctcaaacggtcgctccttggccaaccggtaggatatattgcccaaatgacagcacgcgctcgaaaggtgcccctccaaaatgtctgcgtgcagattttcccgcttgcggctgcgcacgcactcgatgaaattggcgaaaatattacccgagcgcgacggcgcatccaccttggccaacggctccccttcggttttgtctttggggaaaaacttcccatccttcaccacaccggcctcaaagaaatattcattggcaactttgttgggatactccttgagcttgcccacaagcccccgcgtctcaaacaacagcaatgtcccaccaaaatcgagcaccgtcaccatctgattcggcgtctgcccttggtccttgtgatccggcccctcaacgtaccgcccgcccaaactgatgaccgatcgcggcaacgtcccaccaatcacccaccgcgccacatccatctcatgcacaccctggttgccaatgtccccgttgccgaagtcccaaaaccaatgccagttgtaatgcaccaaattccggtgaaacggctgtttgggcgcaggccccagccagatatcaaaatccaaattggctggcggttcctccacaggcttgaaaccaatgctccatcgtggcttgcaacaatatcctttggccaccaacaacttcccgtaaacaccgcttttggccaacgccaccatccgcacgtccccaccggcgcgccgctgcgtcccgtgctgcacaatccgattgtacttccgggccgcctccacacatttgcgcccctcaaacacattgtgactgcacggcttctccacatacacatccttgcccgcctgacaggcccaaatcgtggccagcgaatgccaatgattcgtcgtggcaatggagactacgtcgatttccttgttctccaacatcttgcggatgtcctgataagtctgcaccccctgcaacttgctcgcacgtccctccaacaccttcaaatccacatcgcacaacgccgtcactctgactcccggcaatttctgaaactcgctgatatgattggccccacgcccgtttattcccaccaccgccacacgtatggcctcattggcacccacggattgcgcatacacacgcggcgccagccagatgccggcggcccccaaagttgcggttttcaaaaaagcacgacgcttcaacgacgaagactgcatgtaggctttcatgcccccactctaatctctccgcgccccgcttcaatcccaaactccaactcccaccaaacaccgactaattatagatgaatggcagtgcaggtcttcccaacataagatgagcttgcgcttgcccttccacgccgcggccttacattgagcgtgtgcatgatgcttcggatgattggcgccggcgttttgaacgcctgcaacagttataccacgtcagccaggtgctccattccactctcgaacctcagcgagccctggaactgattgtggaacaagccgtgcagctcaccggcgccaccagtggttcgctggttctcctgaatcctcataccggttttttggaaattgaagcctctcacggccttccacccgaggctcaaaaactcaagctccgcgccggcgaaggcatcaccggctgggtcgtccgcaccggccagccggcactcgtcggcgatgtccgcaaagacccccgctacatcatggcacggcccggcgtccgctccgaattggccgtccccctccaagtcggcgaagaaattcgcggcctcttgaatgtggactccgacaaacttaacgccttcaccgccgaagaccaatccctgctggaagaactctccgctcaagccgctctggtcatccgccaaacctggcaatacgaacaacaccggttgaaagcccggctgtttgaaagcctcgtcgccgtcagccaaatcatcaattccaccgtcaatctggacgaagccctcgccgccatcacccaacaggcctgccaactcatgcaggcacgcctcagctccttgctcctgctcgatgactccggacgctggctggacctccgcgctgcgcacggcgccggccccgactatatcaacaaaccgcgcctggcagtcgaggacagcctggtgggctccgttgtgcgccgccgcaaagtgcttcaggttgagaacgtccaaatctcccagcgctatcaacacgtcgaagtcgccgcccgcgagggtctggtctcgctgctcagcgcacccctcttgtttgaccaacgttgcatcggcgtcctcaacgtctacaccggccggccccacgtcttttccaacgaggaaatccgcatcctcaacgccctggcgggtttatcggccgtcgccatcgaaaaagcccgcctctacgaacgggtggtggacctcgaagaagccctccgccaagctgaaaaattcagcgcactcggcctcttggccggcgaagtcgcccacgaaatccgcaaccctctcaccgtcatgaaaatgctgtttcattccctgaacctgcactttcctctgatagacccgcgcaataccgacgtgcgcatcatcgccgacaaaatggaacaattggaccgcaccgtcgaacgcgtcctcagcttcgcccgcacagccgagccccagtttggccccgtgcacctccaacacgtgctcggcgagctggaactgctggtccgccacaaattgcgccagcaaaacatcctttggaaactcagcctcgaacccgccctccccgccgtttggggcgatgccacccaactggggcaagctctcctgaatcttgtgctcaatgccgtccaagccatgccccaaggcggagaattacgcatctccgcccgccgcctgccgcgcgaccccacccgccccgccacccatgtagtcttggaagtagccgacacaggcgaaggcatgagccccgaacaatgccgccgcgcctttacccccctcctcagcaccacccgcaccaagggcaccggccttggactggtcttggtgggccgcatcattgaagctcaccacggacgcatccaagtcacctcccgccccaaggcaggcacacgcttccgcatcacgctccccgttgaaaaccaaaatcctgcgtaattccccccaatcgcctccggcggcccccttgacatcaagttgaacgtgggacaagttgccattgttgtattatgaattttgcgtggcttagcctggaccttgttttgattgtgctgtttgccttttcgctaccggcacttttcctatatgtcatccgccggtggctccaaaacagcgaatcggcaaacccatcggtggacaaccaaacaccggacccaggcaaccattcatctcactgaatgaccaacggattttttctcgccttcttcgcggcttcctcaaaacaggctttctaatatgcttaagccctaaggaggctcaagccatagggttgtatgccgctcactctttgctcgggaaaaaacagctccaccgattatttcaccattagatctcccttgggcactgaaaaactttttcgctctatttttgctgtaaccgccttttttgatttgttctgaccccgcggctgggcttatcttgaagcagtatagcgatggaccctgcccactcaacgtccagccgcaaccatcgggccacgccacacgcgtggaggaggtgttcatgttgacctttgaccccacgcgattgcaagcggccttgcggttggctgcttccgagctggtcaaagctcgtccggcaggttctccctggcagggtgaaatttccagcagccccacagccaccgctgccgccatctgcgccctcagcctggcggataccgagtggaaaagcgccgaggacaccctgcgccggctcgcgttacatggggcggagtggttgagccaccacgccaacggcgacggcggatggggcgacaccccgcgcagcttcagcaacctcggcgcaactgccctcgcttgggcggccttcgggctggcaccgggaggcgaagcagcctttcaggaacccgcccgtgccgcagagcgctggatatgccaaaaagcgggcaataccgcccccgccatcttggcccccatgattcgcacccgcttccgcggggatttggcgctggccggtggcgttttgatgtgctgcgcactggcgggacgactcggcagtgacattcgcgcctggcgccacgtcccctccctgccttttgagcgtggagcactccctcccgaatggtgggcgtcagtccaaccgcccgctgccagttgggccatgcccctcctcctcgccacaggccaggctcgccatcacaatctcgcaggcggctgtttcgtggtccgactgctgcgcgaattctttcgcaataccactctgcgccgcctcacggccttgcaagcagaggacgggaattttcaaacctcccccctcttaactgccctgaccaccatcggcttgctcgccgccggctacggtcgccatccagccacagaaaaaggcatccgcttcctggtaacctccgcacgtcccgacggcagttggccgctgattacaagccaggacgtccgccttaccgcgcaagccacgcaagcctgcaccaaccccgtccccgggcagccgtggctgccgggcctcgacgaacttcatgccttgcgccattggcttctcgcccatccgcaacacgatgacccggagggactccgcctcccagccatcggttggtcggccagctcacaccccggcgcgtggcccgacaccgtttccaccgcagaagccctcttggccttgcgctcgctcggtgacccgggccctgaggtcattcaagccgtcctcggcggcgtcaattggttgctgttgacccaaaaccgcgatggcgggctgcccccttatcgtcgcggctggtgccacccggaacaagaaggcagttgcgccgaggaaaccgcgctgaccttgcgggcttggctggcctggttgcacgtccttcccccggaccaacaacaccgtgttcaaacctccatccaccacgccatccgttttctcatggacgagcaacgtcaagatggcgcctggcgttcacactggtttggcaatcaatacgcgcatcaggaggaaaacctcaccatgggcaccgccggagtcctcatggccctgcccgaactggtggcccgctcctatttcgagttggtcgaaccactcaacagcgccgtcctctggctcgtcaaaaaccaaaacagcgacggcagttggggcggtggccacggcggccctccctcagtcgaagaaactgctctggcactcgaagccctggccgaaacactcctccaacctggccccctcttgctggaaactcgtgaacaagcacgcaacgccgccgcctggggcgccaactggctagtccaacatatcgaagccggcaattggaccacacctgcccctctgggcttgctctggggacaattctggttctacgaaaacctctggccggccctcggcgtcacccgcgccctggcccgtttgacacgcctggtttaatcccgccaccccccggcgttgtcatccgcggcaggcggctcatgtgccgaaaaaccatccgcgacaatggcttcttcggcgaataatgcaccatcatgtcctgcatccgcatcaacacccacggctcccgcggcgcataaccgtttttggtgaacacaatgtcatcagccacgtacacacacatgtgcacagtccggacgtcctgccccatcggctcatacaacaggatgagatccccaaacaaatccgccttgggcacaatccgatactcgctccgcaacacctgctcctgaaatcgtgcatcaatgaaccggtcctccaccttgtcccggtgaaaattatacgacgaccaaaaacaatccggccacctccccgcaataatatttgtgggatgcggatacgaataaagcaacagccgcggcaccggcggaaaaaaccatgccacattcacactccccccctgcggcaggcgcttcaatgactccaacaacggccgcacctgaagcattcggttgggcagcccccaatagcccatcagccgctccacatcgctggtgggagtcacccgcaaattcaccataagcgtcggcactcgtgccaccgtccggctggcttgcagataatcctctctcgttaacagttttggcaggacatgccggtccgcaaaacacagcaaaccatctttccggtacatcatccgctccatgagcttcagcgcatcttcagacaaactgcattgcgaaaaccattcggaaaactcagcattaaccgcaaacggataacaataagccacattttgttcatcctcggccaaaatggagtagatcttggcccgcggctccggcggcatgtcccgcagcacttcaactgtcggctccacataaactcctcctgtcgtcgcctgccaacggttcgtgtccaacaagctcgcctccaacaaactcggcaacccgcaactttttatgaaatccctcaaagtctccggcttataaccggcaaaaaaccacctgttcgaggaagggggaggcggatcgtacgcaaaatattccactggccgctccaaccaaattgggatgatttccaatattccccagcggtttgttgaggcttcatccttcgccaccaaaccgttgttggatgagcttcgatcagagcgcgaccataaagtgcgaccaataaattgcgcacccaacgtaatcaatacccctgcaagaaccagccataaacttgggagaaattgccggcgaggcacggccccattctgccgctcgctccgtgatgaagtcttggctgggcgcattttcataaacagcctcccttaccactcaaacagcgcccaaagaccagccggcccaaaaacacccctctcccgtcgaagtgtttgcctgttattcgccggatgtattaatcgcccgcccttaaggacgttattcccttgcagccatcccattcaaataaagagacgggacattacctgcgaaaggttacaaggacaacggttttgtgaaaaaaattagcctgaaaaccctcacattgtgaacttacctaccagacggtaagttccgccagggacgcaaagggttgacggtcaaatccgctcacagcctccagcttcaaataacggacctgtaccggtgccggaaacgtcaattcctttggattggcatcggcggacaatgtgccccgcatcaaaggtgttccccagttttgtccgtcgctgctcgtgtaaatggcaaactcgcgtatccacccatttttattgttgtcctgcctcggcgtcagagtcacaccacgcagagtggccgattgttgaaactccaaaaccagccaatgcggaaaagccggagcttcctccccccatggcgtgtgccaaagcgtttgcacgtccccatccacgaccaacttgcccggatgctgcggatgttcactgctcacccgcgatacccggacccccagtttttccatcaaggaaggcggcctcaacaacttttgcacatccgccggcgtccaccgatgcgcgggtttgaaacgtggaccgctcatgtaattcaaaagactgcgccgaagctgccttgccaccggacgctgctccaagtctgtattcaaatccatcgcacacgccaacaaacgcccccgtcccacttgcgcctcgatgattaaccccagtttgcgcgacgtaaaccaatcgtctatcgcatacaccaacggccggaatgtcgcctccgtgcccgtcaacacaaacggatgcgcccgcgacaccaactcccaccattgccagttggaatgatattcagtcggaaaatccgccagcgccggatgcctcggatcgcaataaatgcccaaagtatgcggcgcctgacgccgcgtccacgctgtgttccaaaagatgctcgaaaaaccaatttgcacccgccccaacgcatccccgcgaatggccgatggcggcggattcaacaacaccttgcctccgcgctccaaaaccgccaaggccgccgaatccaaatcagtcgcccaatgaatatcctgcggcacactcacatccaccttggccggatacacccacacatcccaatcattcgcataaggcgtgccttccaccgccagctccaaattcaacttcgcaggcgcaggcatccccttcaatggcacctcaatctgccccaccggactgcagattccagtcggcaacggaccagtgaacatcgtccccgtcgccaactcacgcttcccctgccgcaaccgccagcgcaccacaccctgcggcaaatcctgcggtgcaaaccatcccaactccaccccggcctgcagcgtgtcctccgtggtgaaaatccgtctcggcaatcgcgcaatcggcaccaccggcccggcaaaccggtgatactccgcagccgtgatatagcccttgccatcccaaaacggatccaacacccccaccaacgccgtcccctgcccaggaaaatcatgcaaatccaacaactcgaatccccccatccccggcgtgcgtatcgccgactcaatatcctccttgtaacaaagcgcctgcaatttccccgacgccagcaaaaacgcccgcgccataggcgccaaaccgttctgcttcaaaaagtcctgaaaaatctcaaaattcttcggtttcagccagcccttgtatttcggcatctccgcaaagttgggaaacacacaccattgcccaatctcatgactcaccaccggcgccgcagcccgctggataaacgcccggtaatctgtcaccgtctcaggcggacgcgcattgatgcgtgaattcaatcccccgccccatgcctgaatgcgcggctccggtgtgatgtgaaaatcattttccggaatcatcggccaacccgccccgctggtgtaaagccgccgcgtatccaggcccttgcaataattgatgaaatcccccagccaccgattctgattctttcccgccggttcgttgccggctgaaaacatgataaacgacggatgattgcccaacacccgaaagatgcgcgctgcctcctcgtgcaaccacgcatccaccttgcgcccatcccccacactgctccccgaattcgcccaaacaccggcctccacatacaacaacatccccgtctcatccgccgcctgaaacgccgcctccgggggagtatgcgaatgaaatcgcaggtgattcaacccatgcgcctggcaaatccgcataatgcgcttccacgccgccacatccgtcggaggatagcccgtcaaagggaaaatgttgcactcaagagtgccacgcagaaaaagtttgcggccgttcaaagcaatttgcgtcccctgccgcttcacctcccgcaatccaaacgacacctcccgttgatgacgcaatacccgtccttcatccctcccctccaacgcagccgtcaattcatacaaaaccggcgaaaattcatcccacaacaacgcatcctcttccatctcatactcacactccaccaccccaccctccggagtccacgaaaccggcacagtcaccggcggcacccgatgctgccgtggtccattgtaacttcgcgccgtcaacgtcaacgtcccactgccggagcgccctgtgagattgcccaaccgcgccttgataaccgcacggcggcgagccacgtccggatacacctgcaaatcgtccaaccacacagggtccgtggccgttaattccaacacccccacaatcccattccagttgccttgcgtgtgatccgaaacactgtgcgcattgatccccacctccacatgaagccggttgtccacacgtaccgtcagccgatgccgcccaggcgtcaacgccgcagtacaatcatattcatgcggcgtccccaaactgttccgcgacccaatccggcgctcatccacccacacagtagtctcccaatgcggccgctccaaccgcaacaccacccttttgccctgccacgacgcgggaatctccacctcccgctgataccacgccacccccacataatgccgctccggttgcaaccaaaacggcaccttgatattgcccggttgccggtagggcgcataacgctcatccttgaaaaaggatcggtctatgatttggcctgtccactgcgtctccatggtcaccgggtccccaaatccctgctcctgcaatgaaccaggcaaccgcagccgctcctttaacacccggccatgccacccctcccccacaccggcatcctgccggtccagctcaaaccgccatgtccccgccaaattgatgcgctccgcagctcctgcgtaaaagttggccaatgcaaaaacaatgcatccaaaaaatccaactgccagcctttgggcgcccttgagattgaggtgttgggtcatcatgttgcaagggcagtattgcaaatgccgcactccagtttcaacacccaacaatcacccctctccaacggtggacaaaaccaaacaactcggaaatacttccaccatgaaacatacccttgcctgcatcgcactcctggcttggctggccacggccctgcccgccgccgaacgtttccccaacctcgcagccggtagcaacctcccccaaggccccggctttgcaagcaagttcaaagcagactccggcatcgccaaccatccctccgtcatcttttccgatgattttgaacagggcgatttaggggcacgctgggacgaaaaaggcgccggcaaaggcaaggccctaagcctcgtcccaccaaacgatacacgttgtggccgccgctgcatgaaagtcgaagcccgactcggcgaaaaccagggcgacggcctcaccaaatggttcaaccccgtggacaccgtgtacatccgcttctacgtcaaatttgaccccaactgcgactatgttcaccacttcgtcacacttcgcgccaaccgcggcctccgcggcgcagaccgctggagcggctttggcggcgcaggactcaaaccacgcggtgacgagcgcttttccacagccttggaaccttggggcaattgggccaagtggccgcccccgggcaaatggaacttctacagctattggcacgaaatggatgtctcccgtgatggcaaatattggggcaactccttccaagcagaaccccaggatgtcattcccaaagaccgctggatttgcgccgagttcatgctcaaacacaacacacccggcaaacccgacggcgaacaagccttttggattgatggacgcctcctcggacattggaaaggcatcaactggcgcaccaacccctccctccaagccaatgccctgaccttggaaagttacgtcaccgaccgctggacaaaaaaccccaccaacaccgtctatttcgacaacctcgtcatcgcccgcgaatacatcgggccggccaccgccccctaaatgggcagcgtgggctgcggatttgccgtccctttgtccggcactgcggctgccgcagcttgcgcagcgccattctcaacctgcaccaacgccggccgcaacaccttgccctgatacgtatatcccggcgccagcgtcaaaaggatgcgcgtgcccgcagccggtggctccgcacactgatgggcctgatgcatctgcggatcaaacccctcgcccgcctccggagaaaacgcttgcagccccacccgccgcgccaaatcacgacaaacattttggaacaacccgatttgctccaccaaatgcggctgcccgctctgccgcgccgccatgtacaacgcaaacacctggtccagcagacgcaacgtcaactgcagccaatcctgctcctgccgccgcaacttgtccgcttccaaccgcaacgtcgccttctcggtatcattggcctgccgcagaaaatccgtgaatgccttggcctcagccgccatcccgtcggccacttccttcgccgtttgcaccgtccgcgcacattcgccctggatgttcatccacgcgcccgtagcctcggctatctgctgcttgatggcctccaaattttgaatctgcgccactgtcgaacgcaacgcatccgcctccgccagcttcatctcagcccggtgctggagaataaacggcgtcaccaacaaccacgccccggcagccaccgccgccgtgcacagcgccatattcgccgtgctcaacggccactcgctttggtacacaatgccaccggccaccgctaataaaagcaggtcgcccaataaaaacggcaacaccgacggtctgggagtcgcaacgtcactcatgcgcccgccagcttatgtccttaggcacaacccatgcaacagcgttttaccccacccacaacatcgccactccttttgtccaaatcaaagaacccccaccccaaagcaccccgcccctctcacaccccctgccccactccttttccccgcaaaatatggccattccttgccaaagccggtgtagcaaacaaccgccggtattcataagtttttcctgccatgctgagacaccagcctgtgcgtgttttatgaaaacagtccccttccccagaggaaggggcgaataaccggcataccgccacaaccaacgcacaggcccggaccccggctggccatgcaaatgagcggaagtcattccatgggcgcgcccacggccgcagccaacgtccccgaccttcaggggaacgggatcgaaggcttggcaagccccttgccggccatgtccagcgcctacgacttcctccaaaaccaatacgtttacgtcatcgtctccgcccgcgcccgcggattatccgttggcgtcaacctgaaccccgaacgccgctgcaacttcgattgcctctactgcgaagtcccacgccccatggccggtggaaacccgccggtcaacgtcgaagtcatggcccgcgaagtcgagcgcaccctcgcctacgtccaatccaaccgcctgcagcagcaccccgtcctcggcacgctcccacgcgaatttgtccaattccgccaccttgccctcagcgggttgggagaacccaccctgtgccccaactttgtcgaagtcgtccaaacactcgtccacctccgcgctttagggcggctgccctacttccacctcgtcctcgtcaccaacggcagccagctcgaccaccccagcgtccaggctggccttaaatactttaccgccaccgacgaaatctggatcaaactcgacgccggcacacccgagtacttcctcaaaatcaaccgcacacccgtcccctacgaaaaaatcctcaacaacatactcctcgtaggccgacagcggcccgtcgtcattcaaagcctcttcgtctccgtggaaggcgaggaaccgcccgcccgccaaattgagcagtacgccatgcgcctcaaacaactcaaacaagacggcgcccaaatttccctcgtccaagtctattccgccacacgccccacccaccaacccgcctgcagccacctccccttgaaatccctcagccgcatcgcccaaatcgtccgctgcaccaccgaactccccgtagaagtcttctaacccccccgacctccgtcccacttgacagcccgtggcaaactcctacgttgccaaccatgcatcgcccttccgcttcatcctttggcatcgggcttattctggggttgctcctgaatgccccggcacccaccttcgccgcgttggatactcgcgagctgcacacagaagtcaaaatcaccattcaactgaaatacctcatctggctgccggaaggttatgccttgccccaaaaccgctctactcaatacccctgcatccttttccttcatggtgcagaaaaacgcggcacaaacataaacgctttgcaggaccttggaccgctgaaatatgcgcgcacacatcctcaagccttcccttttatagtagtagcccctttgtgtcccccgggacgccaatgggagccgttggcgttactgacattgttggatgaaatccagcgccagtatcgcatcaaccaacacgccatttacctcacaggctacagcatgggcggtgccggcacttgggccactgccatggcggctccagaccgctttgccgccatcgcgccattgtgcggcagggtcattccactgcttgcaggcaacttgtaccgcacgcccgtctgggtctttcatggtgaaaaagaccaggtcgtgcccctgaaccactccaccgaaatggtggacatccttaagaatcgcaataacccccacgttaaattttcactgctgccgggaaaagaccatgaaatatggcacgatatttacgataactccgccctctactcctggttcatggaacaccgccgcccctgacttgagtacaaccccacgccgcgatccatctaggtgaggcaaaaaacaattccccgcgcaacaacacctttgcctccggagacacgccttcacaatccccgctgctccttcctctgcccataccggccaccatgccgaaaagcaaaattcgccccccttataaattttccatttttcttttgacaaccaaacttttcggcctagagtgacctcatagcttggcaaaccacgtggattaacttcgaggtttcccaacatttaaaatttaaaaggcctgcttatgaacgactttaacctgatagaggagccgtggattcctgttatttaccacaatggcaactattgccgtgtcggcatcaagcaggctctttccgatgcccatctcatccgcgacatcgccacctccaaccccatggaccgcgcgggccttctacgctttctcctctctatagtttattggtgccatggaatgccagcccctcaagaaacgtctcggctaggtgatcctttaccggattgcacaccacatcttggtgcaaagacaaattttttctgccttttcgggcagaaacaccgtttttaccaatcaccaacggcaaaccgagaagtaaaaattggtgaactgtttcaagaaattccatccggaaacaatttctggcattttcgacatgtcaccgataaagaacatggatattgcccagcctgttgtgctctaggcctgctgcgccttcctcttttttcagtcagtggattgccagacttgaaatcggggattaatggaactccacccatctatgtctttcattatggcaaatctttagctcaaattctccgaaaaaactggttgccaatgaagcaaaacttgctgggcacgccatgttggatggaccccaccttggttccaccaatcggagaccctatcccgctgttaatcggattaaccgtcccagcacgcaaagtttggctcggacaacccattcaccatggccgttgctctttgtgcgggaacccatcaaaacacctggttttcgaggctcacattcaatccgccggtacgttggaaaattcaaattggcaagacccacatgttgtttatttcctaaaccaacaacaacgaaagtcatgcaaagctcccaatctcgtcgtaggcggtgaatttcaaatggaccgcccttatgccgatcttatggcatgtctcttggaacgggtccaatttcccgcaactgcgacaagccaacttctaattgtcggttttgccacggacaaagctaaaaatatagatgtttgggagagaactgtaactttggtccttaacgaaatgcagacaaccgcagccacagctttttccacctggtggcgaagtgtaagtgcattgtccaacaatgtttacactattattaaaacaaccccctacaatcggcctcgtgggtccaaaccctcgtatgttcactgccatttttcccacatcagaccccatgtggaacatataatatcatctaacatgcatattctagtaagtgaaccaaacgaaggttggcatgaagcacgccgtgagttcagcgcttttttgccgatgttggctcaatccctctctcccggcgtgacctcccaagccgttcaaaagcgccgtgccatcgctcaggccttgccacctaatccctgcccgaaaccggaaccatccagttcaccctccactcaaaaccccaacttgtaattatgagcgccacccttgaatacattacaaaactgtcccatataaaggccggctcccgcactttggttcgcactcatgccaatctctcattgaaccattccgtggatgcctttgatttgttcaccggtctttggtggcccttgcgccaacaatcacaatttgcaccccgtcgccgcgtggcctggctggtcgccaaacttcacgcagtcagtcctctgccacaccaaccaggccagaccctccccatccagctcgcgaagatttggcataggcagccagacaccaatacaaaaaacaggttccagcgcaaattcgatgatctcctttgccgtcccctggaccaaatggaacccgctttgcaatgggccttgagaacaattggctctgcaaatgagccatccttggactgggtgcaactcaccgacgacctctcccggtgggaacaaccgcaagttcgcgaaaaatgggccgaagtctttttaggcaggtaaactcaaaaccaaaaaagaaaggagcatactcatgaacaatcaaaataccacacgcatacaaatccatctgcttcaaaaccacgcaccggccaacttgaacagagacgatttgggagcaccaaaaacctgctacttgggcggcgtcctccgctcccgcatctccagccagtgcctcaaacgcagcatccgattgagcccctacttcaaagacctctgcggcggtgttcgcacacgccgcctcgcaaaactcatcactgaccaggttgatggcaacaatgcgacgaagaaaaaagtggccgccatcctgaagaaatgtggtttggaggccaaagagaacgacgaaacaaatatggtcgtttacaccacaaaagaagccatcagggaaatggcaacagccttgagaaacggactcgaagaacccgacattatcgccagattcaaagagcttttgagcacgaatactgctgtcccggacatggcactgtgtggacgcatgttggagacaggagaaatcaaggacaccaacgtcgaagccgccctgcaagccgcccacgccatttccacacacgaggctcgccccgaagtggattactatgtgacggcggatgacatccccggaactgatgccggcgctggttatgtggacgaagccatattcgtttccgcctgttattacaaatacttttccattgattgggcacaattgctccacaacctcaagggctacccgggcaacagaatccatctcgcagcccataccgtcggcgcctttatcaaggcagctgccttggtgactccatccggcaaacaaaacagctatgccgcccacaatccacccgatggtatcctcgtggaaatctcccccacacccatcaattatgccaatgcctttgccaaacccgtggacattggccaacgtgatttaatcggccaaagcattgctcaactcgcccagtacatccacgagatggatgccggtttcaaagtcgttgacccgtccaagcgcttctggttttcgccgggcatgcgcaatcgcttggagacctcacagcgcgccggtgatacagcaggcgaccgccaaaccatccgagtccaggcggtggaggttgatcaactcgaaaacctgatccatcaggtcatcaaggccattgacccgatcctcgactggcaggaagtccaaagaaccattctcaataaccatgaagcctgacacacttcttcttagactggaaggccccttgcaagcatgggggcattacgagtccaaatttgccatccgccgtgccgccgaggcccccaccaagtccggtgtcatcggccttctgctggcggccctcggcatcccgcgcacctccgctcctgatgattggttgggccggttaaactccctcctcatgggcgtgcgcgtggaccgtccaggtgtccgttggtgggactaccacacagtgggagctggccttaaaatgagaacagccgagggcaaaaacaaggatggccccctcctcacacgcagagaatttctctgcgatgcctcattcttggtagcccttaatggagagcccgcccttataaaagaactataccaagccctccaacaacccaaatggactctttacttgggacgcaagtgctgcccgccttcaaggccaatactggctcacgcccccggctgtcacaaagatctaccatcggcactacagtctgttccatgggaaaaacggtatgcagacgacaccacaccggaaaaacttgaagccctgctggagtggcgtccctccgaccaacaacccaatgcccccgatgacgccgaaatctggtatgatgccccccaatgcttggaacctcccgctcacggtccccgttttattacgagaactgccttctcagtcgctccagacggccaagtcaccgtggcgccccaacaccaacagcagcttcctttgccgcctccacgcccaagagcaaattacaacaactcagcataccaacgcgctcgtgataagcgtctgcacgccgatcatggcctgtgcgtgttttgcaaaaatcctgccaccaccgtccaacacatcacctaccgccgcgccggtggcaacgaaacaacagaagacctccgctccctctgccgcctttgtcatgatgccgtcaccatgatcgaatacggtttgggtttggagatgggccgcatcaacccggaagacccccaatggcgcgatgccatactcaagaaacgcaccgaaatcatccaattccgttcactcgaaaaccgcagacgttttttgcaaccagaggaggtttaaccatgtatttgagccacttattgattgatgtcggcaccaaccccgaccggccacgccccggccgactttggctgcgcaatatttaccatgtgcaccaacgcctgagcatggccttccccaccactcagcggaaaaccaacgacccccacttcttgaaaccctacaacccggccgattttcccctgcacaaccttggcaaccatgtttcccgcaacgaaaacaccggatttctcttccgcattgaccccgtgccggggggcaatcccctgatcatcgttcaatccagcctcaaacccaattgggactacgccttcaacaatgcggcattccttctggcagcccctccccaatgcagggacttcctgcccaatttcaacaaaggcgatcacctgcgcttccgcatcctcatcaaccttagcaaaaaagccaggacaagccatgacggcacccctctcaccaaagtcaaagaaaacatcctcgataaccaaaaccgccctaaatcccagtccaaacgtgtcgcgctgacatgggatgcaaaccaaaatccacaagatgtcatcattccttggttttcccgcaaggcatacgtcacatgccaaaaccaaacccaacccatccaggcatttcatctcaagcaatgtgaaatcctgcgcatgggttggattatcggatggaaaaaccaccatgcagccccggaaccgacctcacaaaaaatgaaattccgctctgcccttttggagggagtcttggaagtttcccatcctcaagccttcgccaaactagtagcctcaggcatcggctcggccaaagcattcggttttggtttgctctcgctctccccggtttcctccgctcaatgaaactggacgacctccatatcctccccaaattctccgatggttggagctacctctatgtcgagcattgtcgcgtcgaacgagaacaaaacgccatcgccatctatgacacagatggcatgatccccgtcccttgcgccaacctggctctcttgatgcttggcccgggcacctccatctcccatgcagccataacagttctggcggaccacggctgtttaatcatctggtgcggagaacaaggcgtccgcttctacgccaccggtatgggtgaaacccgcaatgccgcccgcctcctccatcaagccttcatgtggagccacgaaaacctccgtttcgaagtcgtccgccgtctctacgcaatgcgttttacagaaaccctgccatccaacctgtcattatctcaaatccgcggactcgaaggccgccgcgtccgcctggcctatgacaaagcggcccgtgccagcggcatcccctggaaaggccgccagtatgaccgccatcattggacccactccgaccccgtcaaccgtgccctttccaccgccaattcctgcctctacggcctctgtcactccgctattgtctcctcaggtttctcccccgccataggctttatccatactggcaaaatgctctccttcgtctatgatatcgccgacctctacaaaaccgaaatcacagtccccatagctttccaagcggccgcccaaggagacaccaacctcgaacgccgtgtccgcatctcatgccgtgacgcctttgccgaatctcacctcttggcccgtattatccctgacattcaaaaagctcttgcttggcaaccatcccaaaacgaaaactccccccttgattcagaccccgcccttccctctcacctttgggacccggatttaggggccgtgcaaggcggaatccaacaacctgccacatcccctttgcccccaactataccagccccagccccggaatctcatgatggtgctaatccttgaatcagtcccaccttcactgcgtggagaactcacccgctggctcttggaactcaaagcgggtgtcttcgtcggccgcgtctccgccctcgtccgtgagcgcctttggaataaatcctgccaccacgcccgcaatggcggctgcctcctcatctaccacaccaataacgaacaaggctttaacatcctctcctatggtaatacatccagaactatcgccaacttcgatggactcctcctcgtcaaaatcccaaaataaccccattttccaagggttttccccacgcacgtgggggtgaaccgcgtggtgcgaggtgaacaagaagatgccaagcgttttccccacgcacgtgggggtgaaccggccgtcacctgcccctcccgatccgtccccacgttttccccacgcacgtgggggtgaaccgcggcaggtggtgaagagttcggcgaagtttgcgtt

SEQ ID NO: 946 - DNA, 103406 bp, Artificial Sequence
  Synthetic Oligonucleotide
gggtcccaatgggctcgcgctccttgttgatgatgacgacggcgttgctgtcgaaacgcacataggaaccgtcgctgcggcggatgggccggcgggtgcgcaccacgacggcatcggccacctggccctttttgatggtgccgtccggagcagcttccttgatgtgcaccttgatgacatcgcccacgcgggcatacatctggttccggccgagcacaccaatggcggcggcgcgtttggcgccggtgttgtcggccacgtcgagaatggaacggacttgcagcataggtcaggagagtttcaggcggccgcgccggcggcgcgttcaatgatttccaccagccgccagcgtttgaggcggctcagcggacgggtttcctcaatgcgcacaacatcgccgggcttggcctcggacttttcgtcgtgcgcgtaatactttttgtaactccgcacaatcttcttgaagcgggggtgtggaaaacggcgctccacccggacgacgatggtcttggccatcttgttggaaaccacctcgccggtgcgctctttgcgacggcgggcggtgacgggggcggaaggggttgcagtggtgtcagccatagtctaaaaaatcatgcctggtttttcttgcgagcggtgatggcggtctccacgcgcgcgatgtcgcgccgcagcaaacgcatgcgcaccggattctccagccggctgccggccttctggagccggaggttgaagagttcctgtcgcaggtcgcggctcttggcctgcagctccaccagggtcaaatctttcaattcactcattttcatggcatcaatgacggtggcgggagatgaattttgtgtgaatgggcagtttggtggcggccaggcgcatggcttcgcgagccacgatttcaggcacaccatcaacttcgaaaagaacacgggcaggtttgatgacggccacccacgattccagcgggcccttgcctttgcccattcgggtttccaacggtttcttggtgtaggacttgtcagggaaaatgcgaatccacagtttgccgcgccgtttcatgaaacggctgatggccacgcgggcggcttccagttgtttggtgtccagccagcagcgctccaaggcctgcaggccgtactcaccaaacgcgacggtgttgccgcgggtggccaggccggcgcggctgccgcggtgcatcttccggtatttaacgcgtgcaggttgtaaaggcataaaacagtctcaggttaacgggcggcggcccggtcatttttggcggtttcaggcttgttttcgccgcggcaaatccagcatttgattcccaacttgccgtaaagggtgtgagcctcggcaaaaccgtagtcaatgttggcgcgcagagtgtgcagtggcacgcggccttccagatattgttccacacgcgccaattcggcgccacccaaacggcccgagcaacggatgcggatgccctcggccccctgttccatggcggtctgcacagcccgtttcatcgcgcgccggaaagagacccggcgctccagttgcagggccacgccctcggccaccagttgggcgtcgaggtccgggcttttgacttcctgaatctcaacgtaaatttccttgccggtctttttgctcagctcttctttgagcttgtcaatttcagtgcccttgcgcccgatgaccacaccgggccgggcggtgaacaaggtgatgcggcagcggttgccggcgcgctcaatttgaatcttgggcaccgcggcatccttgagtttctccttcaagtaccggcgcaattggaagtcttccaccagcagccgcccgaagtccttcttctcggcataccacttggagcgccagtcacggttgacggcgacacgcagaccgatgggattggttttttgacccataatgattagttggctccgtcggaaagtacgattttaatgtggctgttgcgtttgatgatggggccggccatgccgcgcgccttgggggtgtagcgcttgagacggctggcggtcagggcgacggcctgggccaccacgagtttggcggcctgcaattgatggttgttctccgcattggcaatcgcggaatcaagcgtccgcgccaccagccgggccgacttgcgcggcaccacggccagaacggcacgggcttccagggcggacaatccctggatttgacgggtgacttcccgcactttttgcggggacatccggacattgcgggtaatcgcctgtacttgcatagcttacttggcctcggctttggcggtgtgagcgccgtgtttcttgaagatgcgcgtgggagaaaattctcccagccggtgccccaccatgttttccgttacaaaaaccgggtggaacaccttgccgttatgcacgttgaaggtcaagcccacaaaatcgggcgtgatcatggaacggcgcgaccaagtcttgatcggggctttggacttggactccttggccgccaggatcttcttcatcaacgaggggtccacaaacggaccttttttaatcgatcgtcccataggctttcagatcaaagcagtttatttgcgtttcatgggccggccatcgcgccgaaccacaataaagcggttggaaggtttgtgtttgttccgtgtgcggtagcccttggccagcaatccccaaggcgatgtcaattgttgccagccgccaccacccttgctctttccggcgccaccgccgttggggtgatccaccgggttgcgcgccacaccgcggttgaccggccgatacccgaaataccgcgtgcgcccagccttgccccaaacaatgttttcatgatcggcattgcccacctcgccaatggtcgcatagcagttttcgtgaacgcgccggatttcaccggacggcaaccgcaaggtggcatagccttgatcgcgggacatcaaggtggcggagctgcccgccgagcgcaccatctgcgccccacgaccgggcaccatctcaatgttatggatggccatgccgatgggaatgtttttgagcggcaaatgattgcccacttccaccggagcctcaggcccgctggaaaccttggcacccaccttgagatccttgggcgccaaaatgtaagacttggcaccatccggatacttgatcagcgcgatgcgggcggagcggcaaggatcgtattcgatggcctccacagtggccacctggccatgacgccggcgcttgaaatccaccagacgaattttttgcttgtggccgccgccaatgccgcgtgcggtgacgcgcccgtagcagttgcgcccgccagtctttttgcgggtcaccaccaggctcttctccggctccaccttggtgatctcgctgaagtcggccaccgtgatgtagcggcgcgacggcgtcaaaggtctaaatgttttaacaggcataaggcaaatgtaggttaggtgaggttgatgcggtcgccttccttcaacgtgacaatggccttcttccaatcactggtcatgccggcctggggtgtgcgttgacggcgcaatttgccgcgcatgttcagcgtgttgacggcaaccaccttgaccttgaacaactcctccaccgctttgcgaatctgggctttgttggcccgggggtccgccaccacggtgtattggttgtgcttctcggcctgcagggtgcccttctcggtcacgcggacggtcttgatgatttcaaaggcattcatggtgtcaggattggctgaggcgctgtcccacctgcgccagagcagcgcgtgtaaaaacgattttggccggtttgagggcctggtaacaattcaagtctgcgccggtgaccagttccacatacggcaggttgcgggcagccaggcgaaggttctggtcaatggtgtcggtcaccaccagcacggtctggccgggagccagagtgtccagcaaccgcaccagctcgcgcgtcttgggctgggccagtttcaattcttccaccacgatgacttcactggccttgatgcgctcgctcaaagccttgcgcagggccaggcgccgggtggagtcattgacttttttgctgaagtcgcgtggcttgggaccaaagaccacaccaccaccacgccacaagggcgactgaaacgaaccggcgcgggcgcggccagtgcctttttggcgccagggtttcttgccggtgccggccacttcacccatggtcttggtgcaggcagtgccggagcggcgggcggccaggtgggccaccaccacatcgtgcacagcctgcgtgcccttgccgttttcaataatcgggaaagggacttccacttcgccctgcggcgaaccttgcaaatcttgtacggtgagcttcatgacgggtctcctcacttcttggcggccttggctttaccgcccttggccatggccttgtgtttctcgatgcgctcctggcgggccttctccaacacgcgggagcgcttcttggactcgcgaatgatgacgtagtccccctcggccccgggcatcgagcccttgatgagcaaaagattttcagcttcgcgcacctggatgatttgcaggttttgcacagtgcgccgcacctgtcccatgtggccgggcatcttcatgccgcggttaacggtgccggggaacaaacggcagccaatggcgccgctccgacggtgccagcccttggcgccgtggctcatgtcgcccccgcgaaaatgatgccgcttgaccacgccctcaaaaccacggcctttggtcacgccgatggcatccacgtagtcaccggcccggaagatgttcactcccaaggtgtcgcccggtttgacctccagttcaaagtcgcgaaattcgcggatgatccgaacgggcgagccgttgtgctttttgacgtggccctgcagcggcttggtgaggcgggactccttctgctcgccaaagcccagctgcacggccttgtagccgtcgcgttcgtgggtcttgcattgcagcacgcggttggggccggcctgcacaatggtcaccggcacgacgacaccgttggcgtcgtaaacgcgggcgtgccccagttttttgccaagcaaaccaatcatagagacttagattttaatggtgatgtcaacccccgccgggagggtgagttttttgagctcgtccacggtcttggcggtcggttcaatgatgtcaatcaaccgcttgtgggtgcgttgttcaaaggtttcctgggacttcttgtcggcatgcggcgagcgcagcaccgtgaaccgctcgatgcgggtgggcagaggaaccggcccggccacgcgggcgccggtgcgcttcaccgtttcgacaatttcgtgcgccgaggagtccacgatccgataatcgtagcctttgaggcgaatccgtatgcgttgtccaggcatataaagaacaagttaagagtttctgttttacgtccgggctgcaggcttgtttttggcctgatccaaaagttgagcggcaatgctgctcggcacctgctcgaaagtgagcggttccatcgagtaggaggcgcggcccttggaaaggctccgcaccgccgtggcatagccgaacatctccgccagcggcacgcgggccgtcaagacggtggccccgttgcgcacttcgatgtgctccacgtgaccgcggcggcggttgatgtcacctaaaatatcaccctgatactcgtcgggggtggtcacctcgactttcatcacgggctccaaaagaatgggattggccttccggaaagcctctttgagcgcaaagatgcccgccatcttgaacgccaactcgctcgagtccacttcgtggaaggtgccgtccacaatcgccaccttgatgtcaataatctggtaaccggcataaacaccggtgcggacggcttcctcaatgccgctgataaccgccggaatgtattccttgggaatggcgccaccaacaatcttgctctcgatttccacacccttgccgcgctcattcggctcgatgtggatgatggcgtggccatattggccgcgcccgcctgattgccggatgaatttgccctcgccctcggccttggtggtgatggtttcccggtaggcaatctgcggcgccccggcattggcctgcacattgaactcccgataaaggcggtcccgaatgatttccaggtgcagctcgcccatgccggcgatgatgagctgaccggtctcttgattcgtgaaaacccggaaagtgggatcttcctcggccaaccgttgcagcccctcggtcaatttgtcgcgatcgcccttggtcttgggctctatggccatgctgatgaccggttcggggaacgtgggcggctccagcagcacactgaaatcttcgtcgcacaacgtgtcgccggtggtgatgttgcgcaggcccaccagcgccgcaatgtcgccggagaaaacctgctccacgtccaggcgcttgtcggcctgaatcatcatcaaccggttgacgcgctcacggcggcgtgtgcgaggattgtaaatgatgtcgcctttcttcaacgtgccgctgtacacgcggaagaacaccagcttacccgcgtaggcatcggtccacagcttgaatgccagcgcgcaaaactgcgcgttgtcatccgccgccaccatcaatggagtgtggtcgtcgggattctcaccttgagcgggcggcacatccagcggactgggcagataatccacaatggcatccaccaagggttgcacgccgcgcttgcggaatgcgctgccgcagagcaccggcaccagctccaaattgcaggtcagtcgccggatggcagctttcagggtcagagcgtcaatcggtttttcctcgatgaccagctcggcaatggtgtcgtccttgttgctgacggcgtcaatcaattcagccagggcggcggcagcacgctcgcgcagttcagccgggatgtcggtgatggtgaagcggacacccagatcatcctcaggatcgtaaatgatggccttttgattgacgacatcaatgacgccccgcagatggtcctccttgccgatgggcagcacgaccgggtaggcgtaagcgccgagcttgcggcggaggtcgttcagcgcgttttcaaaattcgcgccggtccggtccatcttgttgatgaaggcaatccgtggaacgcgatacttgctggcctggcgccagaccgtctcggattgcggttggacaccggccactccacaaaacacagccacggcaccgtcaagcacccgcatcgagcgctccacttcggcggtgaaatccacatggcccggagtgtcaataatgttgatgcggaattcctggccggcaaaaagcttggcgcaaccgtcttccttgggtttccagtaacaggtggtggcggcggaggtgatggtgatgccccgctcccgctcctgctccatccagtccgtcaccgtgttgccatcatccacatcgcccatccggtgaatgaggccggtgtagtaaagaatgcgctcggtggtcgtggtcttgccggcgtcaatgtgcgcggcaataccaatattgcgcgtccgggccagtggataaggccggttcggcgcatcgagcactttcttttccgtcgcagtttccatgcaaaatttttaccgtatcagacaataaaaacgccccgattttcagcgcagccgacggggcgtcccagtgagcaccactaccagcggaaatgggcaaaggccttgttggcctgcgccatccggtggacctcgtcgcgtttacgaatggcgttgccctgcccctggtaggcatccataatctcggcagccagggcctcgcgcatcgccacacccttgcgggcatcggcgaaatccaccatccaacgcatcgccagagaaatctggcggtcgggcggaacttccaagggcacctgataggtggcacccccgacgcggcgggccttggtctcaatgcgcggcttggcattgtccaccgcgcgctggaggacctccagtggattgatttgcgggttcttggccaccaattggtcaaaagccccgtaaacaatccgctgggccgtgctcttcttgccccatttcatcacagtgttgatcaagcgggtgaccaacacgctgtggtacttcggatcttcggccatcggccggcggacagcttgacgtcgtcgagacataattccaaaaatcctcaggatttcgccggagcggctttcggccgcttgaccccgtacttggagcggctcacgcggcgtttctccacgccggccgcatccaaggttccacgcacgatgtgataacgcacgccgggcaaatctttaacacggccaccgcgcaccagcacgatggagtgttcctgcaggttgtggccctcatccgggatgtaggcaatgacctcatacccgttggtgagccgcaccttggccaccttgcgcatcgccgagttcggtttcttcggcgtacgcgtcatgacctgaatgcagacgccgcgccggaacggcgcgccctccagggccggcgccttcgacttggtggcgacctttcggcgtccaaaacggacgagctgattaatcgtcggcattattgtaaattccgtgttgtgctttcttcaacgtccttccccgggagaggaaaggagcgcggatattagcaaagcattttcaggttgcaacaagtatttcaaaaaaatttttttcttgacaacttattctccatttccggagtcctccgcagccgcttccccggccggagcttcgcctgccgcggcagccggctccgccggcgcaggctccagctccaccagcggcttgagctgcacattccgatgcgccggataacccgtgcccgcaggaatgatgtgccccatgatgacgttttccttgaacccgcgcaggtagtccacacgcgaagtcgtggccgcctcggtgagcacccgcgtcgtgtcctggaatgacgccgcgctgaggaaactctccgtttcgagcgaagccttcgtgatgcccagcagcaccggctggcactccgcaggtttgccgcccagtttctccacccgctggttttcctcttcgtgctccagcttgtccacctgctcgccccacaggaagcgggtgtcgcccggctcagtgatgcgcaccttgcgcagcatctggcgcacgatgatttcaatgtgcttgtcgttgatggtgacgccctgcaggcggtacacctcctgcacttcgttgacgagatgctcctgcaactgctgcgcgccgcagacctcgagaatttcgtgcgggtcaatcggtccttccgtcaactgctggccgcgcttgaccatgtcgcccttgaacacgatgacgtgcatgccgatggggatgaggtgctcctccttctggccggtcatcggatcggtgatgatgatgcaccgcttgccgcgcaccgtcggaccaaagtccaccacgccgtcaatcttcgaaatttcggccgcatccttcggccgccgcgcctcaaacaactcggccacacgcggcagaccgccggtgatgtccttggtcttgctcaccttgcgcggggtcttggccagcaacgcgccagcctcgatgatgtcgccttcctccaccacgatgtgcgcgcccgaaggaatgccgtagctggcaatcacatcgcgaccgtcttcatccaaaatgatgatttgcggatgcaaatcttccttgtggtcaatgataaccttggcctgctgcccggtcgcctcgtcctcctcctgcttcatcgtcacaccttcaatgatgtcgtggaagcggatgcggccggctttttccgaaatgatgggcacgttgtacggatcccattgcacgaaggcctcgcccttcttcacccgcccgccatcggggacggaaatgaccgagccgatgaccagtgtgtgactctccagctcgcgcccatcctcgtcctgaacgatgatgctgccgtttttgttcagcacgatatggttgccgtcctgcagcggcacacaacgcagatcattgtacttgatgataccgtcgtgtttggccttgatttgcggctgcttgaacacctgcgacgccgtgccaccgatgtggaacgtacgcatcgtcaattgcgtgcccggctcgccgatggactgcgcggcgatgatgcccacagcctcgcccagcttgaccatctgtccggtcgccaggttccgtccgtagcagcggatgcagacgccgtgtttgctctcgcaagtcagcaccgagcgaatcttcacgcgctcaatgccggcgtcttcaatctggcgcgccttgtcctcgtcaatctcttcattcgcagccacgaggacccgtttgggatcgcgcgggtcgtaaatgtcatcgcacgcgcaacggcccaccaggcggtcacgcagtttgacgatttcatcttcgccctccaggatggcctgcacccagatgccgttgaccgtcccgcagtcttcttctcgcacgatgacatcctgcgccacgtccaccagcttgcgcgtcatgtagccggagtcggccgtcttgagcgccgtgtccgccaaacctttgcgcgcgccgtgagtcgaaatgaagtactccaacaccgtcagcccttcgcggaagttcgagagaatgggcttctcgatgatgtcgccgctcggcttggccatcaaaccgcgcagaccggccaactgacgcacctgttgcttgttgccacgggcgccggagttgaccatgaggaagatgggattgtactcggacttgttccggttgcgctccaaggtctgaagcatgaccgttgaaatctggtccgtgcaatgcgtccagatgtccacaatcttgttgtagcgctcgccgtcggtgatcacacccttccggtactgtttctccacctccgctatctgcttctgcgcctcgcggatttgcttctccttttcctccggaatgatcatgtcctcgatgccgatggacacaccggcccgcgtggcctcgcggaagcccagctccttgagccggtccaaagtggcaatcgtctcctcatgcccgcaatacttgtagcaattccaaatcaaatcgcccaattcgttcttgccggccaccttgttgaaaaagcccagcttctcaggccacacttcgctgaagatgacccggcccacagtggtctcaatcaccgcactcttcggatcgccatacaccgtctgacgcccgcggtcgggattggccagccgcacccggctgtgcgtcttcaattcaccctcgcgataagcgaagatgacctcctccttggaaccaaacagcatcaggcgctgattgcctttgggctggcgtggctccgcggtgaggtagaagcaacccagcgtgatgtcttgcgtcggcgtcataatcggccggccgctcgacgggctgaaaatgttgttgggcgccatcatcaacaggcgcgcctccatctgggcctcgatggacagcggcacgtgcacggccatctggtcgccgtcgaagtcggcgttgtacgccgtgcagaccagcggatgaatccgtatggcctcaccttcgatgagcatcggctcaaaggcctgaatggacagccggtgcagcgtcggcgcgcggttgagcaacaccgggtggcccttggtgacttcttcaagaatgtcccacacctcggtggactggcgctcaatcaatttcttggccgagcgcaccgtgtgcacatagcccaattccttgagccgccggatgatgaacggctcaaacagcaccagcgccatcttcttgggcaaaccgcactgatgcagcttcagctccggcccaatcacaatcaccgagcgaccgctgtagtccacgcgcttgcccagcaggttttgacggaaccgcccgctcttgcccttgagcatgtcgctcagcgacttgagcggccggttgccggcaccggtgaccgcgcggccatgacgcccgttgtcaaacaaggcatccaccgcctcctgcaacatgcgcttctcgttccggatgatgacctccggcgtcttgagctgaagcaggttcttgagacggttgttgcggttgatgacacgccggtacaaatcattcaaatcggaagttgcaaaccgcccgccctccaacggcaccaacggccgcaaatccggcggaatcaccggcagtaccgtgagaatcatccactccggcttgacgcggttttccacaaacgcaccaagcaaacggatccgcttggccagtttcttgcggatttgcttgctcttggtctcctgcatctgctgctgcagcttttcaatctggcgcggcagattgacgttggccagcgcctcacgcacggcctcggcgcccatcttggccacaaaggcatccggcccgtaagtctcgcgagcttcgcgatactcatgctcgctgagcagttggtggagttgcagcggcgtgttgcccgggtccaccaccatgtaatcctcgtaataaatcacccgctccaagtcccgcgccgtcatgtccagcaccaagccgatgcgcgagggcatgcacttgaaaaaccagatgtgcgataccggcaccgccagctcgatgtggcccatgcgttcgcgccgcacccgcgccaacgtcacttccacaccgcaacgatcgcacaccaccccgcggtgtttaatccgtttgtacttgccgcaggaacactcccagtccttcacaggaccgaaaatgcgctcgcaaaacaggccgccacgttcaggtttgaacgtgcggtaattgatggtctcggggttttttacctccccttttgaccaggaacggatggcctccggtgaggcaaccgagatggcgacgtaatccacctggttgaccttgtccagtccgagcagctcgcgtgctgtttctttcgtattcatgttggctgtggcattggtggggcggaaaaatcccgccccgggtctgcaaagttcaattacaagttggccagggcgctggccggcgtggccggttgatgttcaatgggattggtgtaccccaccttcacgtccagccccagggactgcatttccttgaccagcacgttgaaagattcagggatgccggcctccaaacaattgtcgcccttgacaatgctctcgtagatacgggtgcggccctgcacatcgtccgacttgacggtgagcagctcctgcaacgcataggcggcgccatacgcttccatggcccaaacttccatttccccgaagcgctgaccgccgtactgtgccttgccgcccagcggctgctgggtgaccagcgagtagggacccaccgcgcgggcatggattttgtccgccaccaggtggcccagtttcatcatgtagatgtagcccaccaccacttcctgatcgaacggctcgcccgtccgcccgtcgaacagacgcgccttgccgttgggcaatagcccctgctccttgcccacgggcgtttgcgccgcctgtttgatgaactcccaaatgtctttctccttgatgccgtcgaagaccggcgtcgcaaatttcaatcccagcagcttcgcagcgtaccccaggtgcgtttccaacacctgacccacattcatgcgcgacggcacacccagcggattgagcacaatgtccaccggcgtgccatcggccaggaacggcatgtcttcctccggcacaatcttggccacaacacccttgttgccatggcgtccggccatcttgtcgcccaccgacagtttccgcttcgaggcgatgtacaccttcaccatcttgatgatgccggcgtcaatttcatcacccgcctccacgcgctccatctcctgatcgtgctgggcctgcaaatcatcaaacttctttttgaagccgccgatgatctcattgatcttgttgcggatgggcgaaggatcaatctcgatccggtcatacacctgcgccagcttccgcaacaacgtcttggtaatcttgcgattcgccggaatgatgatttcaccggtctcgctgttcaccacgtccagcggaattttctcgcccagcaagatattgctcagagcctcggtcagttgctcccgcagctcttccatcttggtgcggtattcctcctgcacctgtttggcggcacgacgcgcaccgcccgtctccgcctgcacctctttttccccttccttctccttcttggcggagaccttgacatccatcacaatgccataagtcccgctcggtactttgagagaggtgtccttcacatcggcggccttttcaccgaagatggcccgcaacagccgctcctcgggcgccagctccgtctcgctcttgggcgtgatcttgcccaccaaaatgtctccgggcttcacctccgcgccaacgcggatgacaccgtccggccccaggttcttgagggcttcctcgccaagattgggaatgtcacgggtgatttcctccggacccagcttggtgtcgcgcgcgctcacctcaaactcgtcaatatggatggaggtgaaaatatcctccttgacgatgcgctcgctgatgaggatggcgtcctcgaaattgtaaccgttccacggcatgaaggccaccaacacgtttcgtcccaaggccagttcaccctgagccgtgcagggaccatcggcaataacctgccctttcttgaccgtgtcacccttgttcaccagcgctttttggttgatgcacgtggcggcgttggagcgcatgaatttgcgcagtccatacacgtacacgccattggccggatcgtgtttgatcttgcgcttgccctccggcagcttgccatccgcagtgatgatgatttggttgcccgtcacgctggccaccttgccgctctcctctgccaccaacacagcgcgggaatcccgggccacacgctcctccaaaccggtggccaccagtggcgtctcggtcaccagcaacggcaccgcctgccgttgcatgtttgaacccatcagcgcccggttggcgtcgtcgtgctccaggaacggaatcaaactggccgccaccgaaaccaattgcttcggcgacacgtccatgtaatccaccttcgccggctccacgtccacgaaatcgcccttgcgacggcacgtcaccgtggcggtggtgaagtggcctttttcatcaatcggcgcattcgcctgcgccacggtgaagttctcctcccggtccgcagtcagatactcaatttcatccgtcacacggcccttgaccaccttgcgatagggtgtctccaaaaacccaaactcgttcacccgcgcaaacgtcgccagcgaggctatcaagccaatgttcggaccttccggagtttccaccggacaaatccgcccgtaatggctcgggtgcacgtcgcgcacctcaaacccggcacgatcccgcgacaaacctcccggccccagcgcggacaaacgccgcttatgcgtcagctcggccagcggattaatctgatccatgaattggctaagctggctccgcccaaagaaatcgcgaatcaccgccgacaacgccttgggattgatcagcttctgcggcgtcatcgcctccaacgactggtcaaacaaagtcatgcgctccttgaccagccgctcggtgcgcgccaggcccacgcggcattggttggccagcaactcgcccaccgtccgcacgcgccggctgcccaggtggtcaatgtcgtccaacgttccctcgcccttcttcaggcgcagcaaatacttggtggcctccaccaaatcgctcttggtgaggatgcgcgtgtcgttcttgggcaggttgagtttctggttgatcttgtaacgccccacgcgccccaagtcatagcgtttgggatcgaaaaacagccgcttgatgagcgctcgtgcattggccgccgtcggcggatcccccggccgcaaccgccggtaaatatccttgagggcctcatcctcgttcttggtcgggtccttcttgatgcatttgatgatgatgccgtcgtccactgacgtgtccaccacccgcaacaccttgacccccagctcgccaatctgcttcaccaccgcacgcgacaacggctcaaaagcccgcgccacaaccaaccccttgtcctcatccaccacgtcctcgatgagcaccttgttgggaagatcatcgcgtttctcagcttctttgatgggcagctcttcaatggtgtaaaaaagcttcaacaactcggcatcgctgccacggttggcgtcccctttgcccttttccggctcgtccaaaaatgccagcgcacggaagaaagtcgtggtcaaaaatttgcgacgccgcttcttgcggtccagatacacataaagcaaatcgctcgtgtcaaactgcgcctcgtaccatgaaccgcggtcggggatgatgcggaaagaatgaagcgtcttgccgttgggatgctgggttgcttcaaaagcaatacccggcgaacggtgcaactggctgacaatgacccgctcggcgccgttgatgacaaaactcccctgcggagtcatcagcggcagctcgcccatgaacacttcctcttcgcgggcgaccttgccgttttcctccaaacggaaagtgacatggagcggtgcgccgtaagtctgcccttcgcgcaggcactccagccacgtcatcttgggctcgccaatcttataagaggcaaagtccagcttgaacttgccgtcgtagctctcgaccggaaacacctcccggaacaccgcctggaggcccacgtctttgcgtcgtcccggcgggacatcagactgcaaaaactccttgtaggaggtggtctgcagttcgataagatccggcgggttgatcacttctttaatcttgccgaaattcttgcgttcgatggctcgcgttgacatgggacttgctctattgggccggcggcatgtacagcctgtacatcccgacagccgggttcgggcttagacagcacaaggcgagtccccccttcccggggagtgctcgccaaaacatggatgaatccaaccgatactacgacttttatcttgccagtccgccctgccggccgcccgcaaaccggacaaccggccgaaggggggcgccacccggcgccacccctccagcggacaattacttgagttccacggatgcgccggcctcttccagcttcttcttggccgcttcagcatccgccttgttggcgccttcaagcaccggcttgggagcgccttccaccagcgccttggcttccgccaatcccagaccagccttgatctcgcgcaccgccttgatgacggcaatcttcttgtcggcaggcaccttggccaggatcacgtcaaacgtatccttggcctcggcaggcgccgcagcagcagcaccacccgccggggcagccccagccgccgccaccgctaccggcgcagccgccgtcacaccccatttggcttccagttctttcaccagctccgcgatctccaatacggtcgcgttgctcagttcttccacgatttttgctttatccagtgccataggtcctttctgtttcgccgcccggcgtggccacgccggatttcagcccgctgcccgcaggccggcgagttacatgttaggttgttgactttttccccagccgttggctgcagcaggagaaaaactgtgatgttaattctctcgaaaaaggcttgctcatgccgccgcaggcgcgccttctttttgcgccttggcctgcagtactcgcgccagttgcgatgccggcgtgttgagcagcgccaccagcttggtggccggcgcctgcaacagacccagcaacttggcctgcaacacctcgcgcgacggcaaatccgccagcgccaaaaccatggacgcttccaaccgctgattgttcaaatatccaaagcggattttcggcttgtcctgctccgcagcggcaaacgtcttgagcgccttggccgccaaggtcacatccttcttcccggtcaccaccgccaccggcccctccaagggcccaggaagctccacccccgccgccttggcggcatgccgaaacaggctgtttttgaccacatgaagctccgcacccgcctccgccaattggcggcgcagggtcgtaagctgggccactttcagtccggtatagtccaccgccacaaaaaacggagacgcattcaaccggttgagatattcctgagttaaattttgtttttcagcacgcatgatgattccctccgctgcaggcttgcgttatgtggtggcgaactccttcaagtccaccggcaccggcggactcatcgtcgtggagatggtgcagctcaaaatgtagcgccccttcacactcgaaggccgcgccttttgaatcgcctcaatcaccgtccgggcgttttcctcaatctgctcgggtgcaaaattaatcttgcccaccggcacatgcacattaccgcccttgtccaccttgaactccacacgacccgccttgaactccttcaccgccttggcagtgtcgtcggtcaccgtgccggtcttgggattgggcatcaaaccacgaggaccaaggattttgcccagtttgcgcacttcggtcatcgcctccggcgtggcaatcgcaatgtcaaattccgcccagccttcctggcacttcttaatcatgtcctcaaagccgacatactcggctccggcggcttttgctgcctcggcggaagcgccgctcttggcaaacaccagcacccgcaccaccttgccggtgccatgaggcaacggtacagtgccgcgaatcatctggtcactttgcttcgggtccaccccaagatgaaacgccaaatccaccgtctctgtgaacttggcccggggcattttggccaacagcgccaccgccgccttcagcggctgcgccttcttgccatccagcaggctcagggccttcttgtatcgtttgctgcgttttgctgccatgttaatggttgcggtacaatcgagggggactccctctcccgcgttggtttgttgttagtccacgatttcaatacccatgttgcgggccgttcccgcaatcatgcgaaacgccgcctcctccgagttggcgttcaaatctttctgtttgatcttgacaatctccatcacctgcttgcgggtgactttgcccactttttccttgttcggcaccttcgagccggtggcaatccccgctgccttcttcaacaaaaccgacgccggcggcgacttcgtgatgaaggtgaaggacttgtcctgatacaccgtaatcaccaccggaatcgtcatgcccgcctggctctgcgtcttggcgttgaattccttgcaaaacgccatgatgttcacaccatgctgacccagggcagggcccaccggcggggccggattcgcctggccggcggtgatttgcaacttaatctgtccaacaactttctttgccataaatcaatcttcgtcctgtccgcaacgcttacgttttttccacctgccaatactccagttccaccggggtgttgcgtccaaaaatgttcaccgtcaccttgagcttgcctcgctccggctcaatttcctcaataaccccgctgaaattcaggaacggcccgtcgttaatcttcaccgtctcgcccacttcaaagttgaccttcggcttctccacatcctccgactcgctgatttgagccttgatgctctcaatctcctcatccgccgtcggcgccggacggtcccctccaacaaacccaatgatgccctgcgtctcgcgtatgaaataccacgggcggtcaatcacccggttgttctcatccaggagcttcatccgcaaaaacacgtacccgggataaagcttgcgggtgctgacggtctttttgccgccacgcacatccacaatcttttccatcggcaccaatacctcctcgatgtattcctgcatctcctccgccttgatgcgcttctccaggctctccttgaccttgagttcctggccggcaagggtgtggaccacaaaccactggctcttggatgagggcataaactcgaaaaaggggcgttaaacagtggtcacaaaccgcatcaccaaaagcagcaccgaatccaccacaatggtgaacaggctcaacaaaaccaccgacaccagcaccaccaccgtgctgcctttcaactcctcacgaccaggccaggtgcatttgcgcaactcctcccgcgtctcctgaatatactgattcaggcgcaaaaaatgccctttccgccagaggtagaacaccacggcggccaaggcagccagcccgattatcttcaaaatttcacctgtttccatatcagtctcctgacttggcggagagggagggattcgaacccccgtcccgcgatgcgggaagcggttttcaagaccgccgcattagaccactctgccacctctccggcaaaaaaactggcagggcgtgagggactcgaacccccaacaggcggttttggagaccgctactctaccaattgagctaacgccctgttgccgcagagattgttgctcactgtctctccggtcgcttgccggtggttcgcaccgggcgccccgccacgccggcaggacgcccgcgcctgtcaaactgttcgttaatccaaaatttccgtgatacgaccggccccaatggtccgaccgccttcacgaatcgcaaaacgctgcaacttctccatggccaccggcgcaatcaccttgatctccatggacacgttgtcgcccggcatcaccatctccacgccctgcggcagcgtcaccgtccccgtcacgtcggtggtgcggaaatagaactgcggacgataattggtgaagaacggcgtatgacggccaccttcttccttcgacaacacgtacacctcggccttgaagtgcgtgtgcggcgtaatcgaacccggcttcgccagcaccatgccgcgctccacctcttccttcttcacaccgcgcagcagcacgcccacgttgtcgcccgcctgcgcgctgtccagcagcttgcggaacatttcaatgtccgtcgccaccgtcttgcgcgtctcacgcaaccccacgatttccacttcctccatgcgcttgagcacaccgcgctccacacggccggtcaccacggtgccgcggccttcaatgttgaacacgtcttcaatgcacatcaagaacggcttgtccacttcgcgcgtgggcagcggaatgtaatcgtcaatggcctggagcaggtcttccacagccttgatgccctcaggcttcaattccatggcggcgcgggagctgccacggatcaccggcgccttcgctccgtcgaaaccgtacttggtcaacaagtcccgcacttccatctccaccagctccagcaaatccttgtcgtccaccaggtcaatcttgttcaaaaacaccacaatcgccggcacacccacctggcgggccaacaatatgtgctcgcgcgtctgaggcatcggaccctcggcggcatccaccaccagaatcgcgccgtccatctgcgccgcgccggtgatcatgttcttgatgaagtccgcgtggcccgggcagtcaatgtgcgcgtagtgccggttgttgctctcgtattccacgtgagagaccgcgatggtcaccgtcttggtttcgtcacgcaccgtgccgcccttggtgatgtcggcgtagctgatcggcttggccaaccccttttgggattgcacatgcacgattgcagcggtcagcgtggacttcccatggtcaatgtgcccaatcgtccccacgttgacgtgtggcttcgtacgttgaaattgctcttttgccatcgcagttcctacggttgatgtttacggtttttaacaactgtttcgggcggccatcgccgccacactttttttcatggagcccatgatcaggattgaactgatgacctcgtccttaccaaggacgcgctctgccaactgagctacatgggcatccatgtatcactttcctgtcattgtaaaagacaaaactcccgtcagaccctgtgcttcttcccgaaaaacccacagggactaacgtagtcgtcctgtaataggcccaatgacgccggggaaattacgcccctgcaaaaaaattgtcaaagctttttttccactttttttccctcaccttgccccacttccaccgcctccgccacccggccatcccaccgccgcatcaaatggttgcccgcccaaatgaccatccccgccatcaccaaccccccgggtatgtccaccgcataatggtagcggcaatacaccgtgctcaaacacaacaaaaccaccaccaccgcatgcgcccaccgtattccacgaatatagcgccatgaaaaatacaacgtcgtcaccgccaccgccacatggctgctcggaaaggccgcccccggcgtctcaaaatgatgataaatcagcgccatgatttgaaaaaacggccccttctgcaccgccgccggaaagtcaggcaccgtcgtcggcatcaccgccgccggcaaatcaaaatccccaaaatcccggtaaaaaatccgcgggcccaccaccggcaaaaagatatagaccagaaaacacgcataaaaaaccaccgaaaccagggtgatgtaatggaaaaattgcctccgatcttgccggtacaacgccagcccacaccccgttatcatgatataatacgaaaaataagacacataaaaaacctcactcacccacaggtacggcagtttgtccatgaacagcaaactcggctggcacccaaacaaccgttcctccatccggatgaaccacgggtccaacatccccgtggcaaacatctgattcaaatgccccgtctcattgtaaatcgggacatacaacatgatgggataaaaatgccggacaaaccgcagcaatgccccatgtcggcccgtcgcttcttcacatatcaacaaatgaatcatccccaccaaccccagatgccccaacaccaaccaccgccactgcggcactgtttcattgtgaaagataagcaccaacaaccccaccaaggccacatacccctgggtcgccacatcaataaaacgataatgcctcatgcctcccaacctcccctcatcccaaccaccccgcctcacgataccaatccaaagtggccggcaccccttgcgccgcagccgtgggcgcctcaaagcccgtcatctcccgcaaacggctcacatcacacacccaccccgccgcggcaagttccttgtatttctgcaaattcaccacattgggacggcgggtgatctgcgaaatgatttcctgaaccgcgcacaccggccacaaagccgccacaggcaaggccaggggaaacggtttgactccccaatgccgcgccgccaactctcccagttgccgtacattcaccacctccggatgcgccacgtgaaacacctgtcccaccgcaccctcatgcgtcaaacaatgcacaaccgccgccgccaaatccggcgcatataccaagctcaactgctggcgtcccccgccaaagcacggcaacacaccgcgccgcaccgccttgaacaacttgaaaaactcaccatcccgcggcccataaacacccgggggtctcaaaaccaccgccggcacacggcattgctcccgcaccacctgctcggcggccagcttgctcttcccgtaatcggtcaatggcctcggtggatccgactcccgcgccggccgcgccgccgtggccggccccgtaaccgccaaactggaaatgtgcaccaaccgttgtacttccgatgcacgacgattgatggccgccaccaagttcaaagtgccagcatgattgatttggaaataaccctccctgtccagcgccttggtggcccccgcgcaatgcaccacatgcgtcaccccctccagggccgaccccaaagattccgccgactccagcgatccctccccaatttccaccttccccaagtgcccctgcaaccacttccgcgggctgctggaccgcagcagcacccgcaccggccaacccgcccccacaaggcggtccagcacgtggctgcccaccagcccgctggcgccggtcaacagcactttcatggtcggctaaatcagccccagttcacgccccacctgggcaaattgttccagcgcaaaatctatttgcgcatcggtgtgcgtcgccatcaagctcaccctcagcagttccatcccaggcggtatgcccggagaaaccaccggattcacaaacaccccccgctcctgcaatcgcttgcaaaactggaacgtcttgagcatgtcccggatatacaccggcaatatcggcgtctgcgatcctcccaaatcaaaccccagcgacaacaacccccgcttcatccgctcggtgttctgccacaaccgcgcaattcgctccggctcgctctgcatgatcttgaccgccgccaacaccgccgccgcattggccgggctcatgctcgcgctgaaaatcaccgttttggaatgatgcttcagataatcaatcgtggctgcatccgacgcaatgaaccccccaagactcgccagcgacttgctaaacgtgcccatgatgaactgcacttgatcggtcaacccaaaatggctcgccgtccctgcgccattcactcccaatacgccgatcccgtgcgcatcatccaccatcaccgccgcccggtactcccgcgccaaacggcagacctccggcaaattgatgatgtccccctccatgctgaaaacaccatccaccacaatcatcttgcccgcatccaaaggcagcttttgcaaccgcgcctccagcgcacccatgtcattatgcgcaaaacgcgaataatcccccagcgccaatcggcacccctccacaagactggcgtgattgctcttgtccgccaaaatatattcatccttgcccgccatcacgctgatgacccccagattcacttgaaatcccgtgctgtacaaaagcacagccggcttgttcaccagccgcgccagcgcctcctccaactccaaatgcaaatccagcgtgccattcaaaaaccgggaccccgcacagccgctcccatacttggccaccgccgccatcgcggcttccttgatcttgggatgattcgtcagccccaaataactgttcgaccccaacatcaaaaccttccggccattcatgatgacctcggtatcctgcgccgaggaaatcgtgcggaaatagggataaagccccatcgcacgcacttgctcggcacttttgaacgcgcgcaccttgtcaaacaacggcaaatccgctgtttccgccgtgcacgccggcggatttttggctccaaggccctgttctatcatgggcgaataggtgtcccgactcatataagtcggccctttgtgtcgcaagttggggttatttattcaatcaaaattattgggagcacaaacacccccctgcctcccgcccccgttggaaaaagggcgcgcaaccggaaatactcatggaaatatcgtggtccccccctcaagcctcgccgttggcacggcggaaaatctcaaggtgatccaccacattgatattgtgctgctgcagagtttgcaccgcccgatccggatcatcaaaacggaacaccagcacgcctttgttctcctttttcaacgtaaaggcatacatgtactccacattgatgccggtcccctccaacaccgcaagcacctcggccagcccgcccggcttgtccggcacctcaatcgccaccacatcggtgaccttcaccacaaagccgttttgctcaagcaacacccgcgccttctcccagtcgcgcaaaatcagccgcaaaatgccgaaattttgcgtatccgcgatggagagcgtcgtgatgttcaacccctcggcggccagcacgcgcatcggcgcgctcagtgccccgggtttgttttccaaaaacagagagagttgtttcagtttcatggctgtggagcggttacattttgcgctggtcaatcacccgtttggccttgccctcgctgcgttgcaacgtgcggggcgtcaccagccgcactcgggcccgaatgcccaccgtgctttcaatcgcgtgcgaaagccgttgctgcagcgcctccaaggcgccaatcgtgtcgctgaaaacctcggctgtcacctccacctgcacctccatctcatccagccccttctcgcgggtcaggatgatttggtaatgaggcaacgtcccttccacactcaacagcgcggcctcaatttgcgagggatacacattgaccccacggatgatgaacatgtcatcactccgccggctgatgcgcttgatgcggcgaagcgtgcgcccgcaggcgcaaggttcactcgtcagcgccgtaatgtcacgcgtccgatagcggatcatcggcatcgcctgcttggccagcgtcgtgagcacaagctcgccctcctgttcatcccccaacacctcgccggtctgcggatcaatgatttccgggtagaaaaagtcctcaaaaatatgcggcccacactggcactgacattccatcgccacacccggccccacaatctccgacaacccgtaaatatcatacgcccggatgccgctctcggcctggatgcgctgccgcatgctctccgtccacggctccgccccaaaaatgcccgcccgcaaaggcagctcccgcaaatcaatccccatctcagacgcctgatcgagaatgtgcaaaaaataactcggcgtgcagcaaatcaccgtcaccccaaaatccttcatcaccataagctgccgctgcgtgttcccgccgctgatgggaatcaccgtagcccctagccgctccgcaccataatgcgcccccagcccgccggtgaacagcccgtaaccatacgcgttttgaatgatgtcccccgcgtgcaccccgcaggccgcaaaactccgcaccatcgcctgcgtccacacctcgatgtccgccgcattatacgccaccacaatcggcttgcccgtcgtcccgctcgaagcatgaagccgcacaatctcatgcatcggactcgcaaacaaaccaaaaggatacgtatcccgcaaatccgtcttgaccatgaaaggcagccgcgcaatgtcctccaacccgcgcaaatcagcgggcttcaccccccgctcatccatgcgctgacggaaaagctgctgatgatcataagcgcgctggacaatcgccttcaaccgctggaattgcaatgcgcgcaattgcgccggcggcaaaaaatccggggcgcttaccggatgaaacggaatatcggtaacggatttgctcatgaggaaggttacaggattgattgtccgcaaaacgcctccccgcccgccttccgcatcgtgcaaaaatcaaccccgcgggccaaccacccgcatggccacacagcaggcttgcgtttcgcgtgaacaccgcccccaccctaccccctccccacccccccggcaactccaaactgcacccttcgatttgcccctgagtcaattcgtaatcacctgatcaatttcgaaagtgaatcatgggtcgggacgtttcctcgatcatcagtctcggtttccaagttccgttggaaattggtttgaccggagcgtgggttcgcccaacatagccgcggcatgaaacctaaagcgtatgcggcggcgggggtggatattgacctgggcaaccgggtaaaggccactctacccaagttgctcgccgccactcatcggcgggaagtcctcggcaaggtgggcggatttggcgggttgtttgcgctggacacccggaagtaccgccagcccgtgctcgtttccagtgtggacggcgtgggcaccaaattgaaaatcgccttcgcgatggacaagcacgacaccatcggacaggacttggtgaatcattgtgtcaacgacatcgccgtgctgggtgctgagccgttgtttttcctcgattatctcggcaccggtgtgctcgagcctcgggtgttcaccgaaatcatcaaaggttttgccgtggcctgcgcgcaaaacggctgcgcattgatcggtggcgagactgcgcaaatgcccggtttctaccagcccggcgaatatgatgtcagcgggacgattgtgggagtggtggagaaaaagtccatgctcgatggccgtggtgtgcggcctggcgatgcgttggtgggactcgcatccagcggtctgcataccaacggctattcgctggcccgcaagattttctttgaacaaatgggcctgcgccctgacagccggttgccggagctggggcagactttgggggaagaactgctgaaggtgcacgtgagttacgggccggtggtgcaggcgttactcaagcgcttcaatgcgccaggggccccgcgccgcatcaaagcgctggcccacatcaccggcggtggttttgtggacaacatcccgcgggtgttgccatcgggatgcgatgcagtcattcgaaaaggtacctgggaagtattgcccattttccggctgttggcggaggtgggcaaggtgccggagcaggagatgtatcaagtattcaacatgggtgtgggaatggtggcgatggtggcggcggaccaggcggattcggtggtgcgcttcatccggcgccgggggcaccaggcttggattgtgggtgaaattgtgaagggccgcggcgtgacgcgagtggtttgacgctggaagtttaatccgccgggcgccagtcgagcacctggagctgcacttgagattgaccgttgtaccgattgatttggggaatcacggcaaggtcaaaaacgcccacaggccaatgtttgtcagcgcctttccaccacacggcttccatggtgaggcgcccatcggtcacccacagtttcaagtgctgttggtgggcgccgatgcgcagcgggacgcgctggttgaccaggcggtggacgcaaagatgcaccggcgggttgttttgcccaaaaggcgccaagcgttccaaggcggccaccgtctcaaccgttaattccgccaaagaggtgcctgcatccagacgcagagggggaatgagctgatcatgtttcaaccaacaacggcccaattcgttcaagcgcgtgcgaaaagcggggaggttttccgggcgcaaggtgacgccggccgccattttgtggccgccgtggcgttccaacaaatcgtgacactgctccaaggcggcggcgaggtcgaagccttcaatgctgcgcccggagccgcgcagccaggggccgtcgcccccaagaataatcgttggccggtaaaagttctggaggacacgcgcagcaacgatgcccaccacgccgatatgaaaatcgggatggccggccacgatgacgaaatccttttcagggttaaacgtggcttccagttgttcaaggagggtggagaggatttgtttttccaattcctgccgctcgcggttgcggcggtcgaggctggcggccaggggttcggcttcttccaaggtttcggccagtaacaagcgcaaggcttcctcggcggattcaaggcgcccggcggcattgacacgcgggcccagttgaaagccgatgtcgcgcacgcccaccggttcgcggacctgggccacagccttgagggcttgcaagcctgcgcggcgggtggtgttgatgtgtttgagccctgcgctcaccaagatgcggttttcgccctgaaggggtaccagatcggccaccgtacccagagcgacaaggtccaacaggggccgcaaatcagtttccatgaactcgggctgattcaggcggcgtccttctcgggtcaaggcgtgaacaagtttgaaggcaagtcccaccgagcaaagctcggtgaagggggcgtccacggcggagggatgggttgaaaaaggattgaccagggcggtggccggcgggagggctgccgcacattgatgatggtccagcacaatgacctccactccttcgctttggaggcgagagatggtttccaccgccgttgaaccgcagtccacggccagcagcaggtgggccggatgctgggcaagacaattgcgcgccgcatcctccgtcaggccgtaaccttcttccatgcggtgaggcagatatgtgcgcaccacccagccgtggcggctgagaaaaagttgcaacaaagccgtggcggaaacaccatccacatcgtaatccccgaagatgaccaccatttccccgcgttcacgggcggcccacaaccggctcacggcctcggccatgccgggaataagcaaggggtcctgaagctcgcgcaggcgcgggttgagaaaacggctggcctgcgcaggttccgagtggccgcggttgacaaggcactgcgcgaccaatggcggcagcgaaagctcgcgcaccaggcgttgcaccaacaacggttcggccggggcggtggaccaccggtatttcatgaggcacggccgaaaccggcagaaaagtttccatcaatcatgaagcagggatatagcaaacgaggctcaaaagtaaatggcgcgatgccgcggccaaatgttttcgggggggttgcacgaggccgctggagttgggccgccagcaaaattttcttccaagacttcaacgcgctccggtcccctgcaacacagcagggatggtgcggaagaggattttcaaatcgagccacaaagaccaatggtcaatgtattcaaggtccagacggacccattccttgaaatcgctgacgttgttgcggccgctgatttgccataggcacgtcaggcccggtttcacgctcaaacgccgccgatgagacaggtcatcaaatcgcgccacttccatgaccggcagggggcggggacccaccaggctcatctcgccccgcaacacattgatgagctggggcaattcatccagactgtatttacgcaagaagcggccgatgggcgtgacgcgagggtcctgggaaattttgaagacgggcccctgcatttcgttgagggactccaactcgtggcggagctgctcggcgttggtgaccatggtgcggaatttcaacatgacaaaaggcttgccatgcagcccgcagcgttcctgacgaaagaggatcggccccggactggtcaaccgaatcagcaacgcaatcagcagcatgacgggcgccagaataaaaagtcccaccagcgctccagtgtaatccatgatttgcttggccaaagattgccaactggcttcgggggcgctgcggaacaccacaaccggcaggtccatgaattcgtccagcgaagtccggtaggtctgtgttttgaagaagcccaccaccatccacgcctccacgccctccagctcgcaggcttggaggatttgctcggcttcccggaagttgctgtggccgcagtgcaccaaaacagcgtgggcggaatgttgatgcaaaaggcccgtgagaacttcgggtttattccgttccaaattcaattcggccaccaccgtggcggagccgggccctaaagatttgagcttggagcgcaggatttggaggtccccttcgttgccgcccaccacgataacgcgtttctccaattggtcgcggccatggctggtatggtagaggccgctgagaagcaattccttgcccatcaacaagagaaaactaataccaccatagagcacgagcacgccacgggccagttgctcgcggaacagaaacatggcgagaatggcggccagtgtagtaacaacgctggctttgagaatcatgagcgccgtgcgccgccgcgagaagaataggggtcgttggtaaaagccaaaccaactcaaggcaatccatgccgtgggggcaatgaccaaccaaagccacatgaaatcatcgaagggggcaatggggtcgcgtcccagaagatgctggtttttggagcgcagctcatgggccacccacaacgccagcaaatgcaggccggtgtccatcacttgatggacccgcgtgcgaagagcgctggaacgtcgcagcatgatattctttacaacctgatcgagccgagtcgtcgagccgggttgtccggcatccatttaagccccgatcggggcatcggcgtcaagtccccccatgccgtcaaggcagggctcgggcttgcgccttgaccggcggggccggtggcaactgaaactgaggcacggcttcttgaatccattgcaccatccacttcacggtggcctcttcctcacccggtgcgcaggtggtgaaaagggaaatgtaggcccagcgttgcagctcgccggtgcgcaacatgtgcagtgtttgagaccagacgcggcgcgtgtgcagcgccgaaatttcgccatcggctacaaaccagtaaagatacattccgcgcaaggtgacttcccctttgggggtctgcatggtcttagtggactggactttcatcaccggcaaggagtattcgatgggccgctgcatcggcacttgaatgatctcggtgtcgctggccttgtattcccaaccctggccgttgagacaaaactccggcttgtgaatgctggtgcggtcgccacccatgaggaccacactcaccaaaagtttccgttcatcaggccattcgtacaaacggcggccgtaggtggtgtcggagggcagccagatgagttcgagtttgctcaccggcaccgaagtggaggtggctcccatcacttcaggcggcaggtacacactttgtggcatgaccagccggccatcttcaccccaagtgggttcattaacgagtttgacccccggggcgccaagatgctgccgggttttggcctggttcaatgccatccccgtccctaccatcaacaatagggccgccacaaaaacctgcactgcgcgctttgtcatacgacttcaggaacacccgccggcggggggacgcggcgaggggtaaacagtttgccggtcaggtacaccattgcaaatcctaccacgtaaggtaggaaactcaacacggtgctgttatggacgtaattaccgccttcctgcccgaacacctggcctgcggccacaatgagaagcaaacgcaacacattgctgacaatggccgccggcacagccataagcacaatgatgccccgctgccacatcggtttgaaaaacacaaacccgtaaatcatggtcagcacaagcagcgcggtcaggctttgaatgccactacaggccggggcgatttcatattggaatttaccgctgggatcaaaaatctgcgtgccgttttgaatgaccggcacccccagcacgtgatgcgacaacgccacggtaatctgcgtggccactagtcgcagcggaaaggtgatggcctccgactgcgtggccaaaggcacgcaaaacaccagaaggcagaagggaaacacggttttcttcaaccacaaccatccccacaacaggcccgtgatggcgtaaatgcccaaataaaaacctaaaatggaaatgcgcgcctgctgggccaggtaaccgagcaggtgtagtcctgaggcgatggccagcagtcccagagccggccaccaaggcgctttgggcagaggcagtaattcctggcgtttccaccacaagagcatcaacaccagcaggggcatgtagtagccatgttggtcttcgggactccattcgtaggcgtgaatcatccaacccagaaggcttccggtcttgatgtagccgaaggtgctgttgccccaaaagtgaaacaacaaaatccacactgccagcagggcccagaagagttcgcgatggggaaattgggcccatgccgccgtcacgtccgcccagagttggcgggctgcagcaagcaaacttttttgctgttcggtctgttgggtggtggcttccacactcatgcgcttacgtaccgcgcattaatttagacaagcttggcacccaattcactcaaaaatagcgaaaaaaagatggtcttgtcctgaaacaggcaatcaaggtttaaaaagcggatcctccaccgtttgctgccattcttgcagggatttcttcaattgctccatcacatcggcaaaatttgcctcgccggaaagatcgcgtgtttcccatgggtccttgcgcagatcaaagagctgaacacggttggcctggggataaacgaggagtttgtagcgctcgtcgcgcaccatgcgttgatgttcccgataggcagcgtaaagcgtggtataaaccttatcttcgcgtccctgcataatgcccaccagactgcggccctccaccaccggcggcaccggcaggccggaaagctcacacaacgttggaaaaacatcgtgcaaatagcacagcgcagccgagcggcgattggacggcacaccgggcccgctgaaaacaagcggcacacgcacactgtgatcgtaaaggttttgcttgccgagcaacccgtgttgcccgacagccaaaccattgtcaccaccaaagaccaccaacgtctgccgccgaagcccccgagcctccaacgtgttcaaaatgcgcccgatttcggcatccaaatgcgatatcattccgtaataggctgcaatttcctgctgcaccgccttcggggtacgaggccaggggagcaatttttcatcgcggaccttgagctcaccattgtcgaaggggtgctccggtaaaaaattggggggcagtttgattttctcggggcgatacatcgcagcaaactccgggggcggcgttcgcggatcgtgcggcgcagtgaaagccacgtaaagaaagaaaggctgttccactggatgtcgctccaaaaattggatggctgcgttggcaaagagggtggaggaaaaaacacggttggtttggcggcggttgttcggatacgcgccagtgggatcgtagctgtgcaccggcacctgctcatgatcatgcatgccaccaaagaaaattgcgtcgcccgctgtaaaagcccgattgaaggaaggtttatcgttgtgccacttccccactgcaaaagtgcggtaaccggcggagcgaaagacctccggcatgagcactgcgggagtacggatgacatggtctgccgggcgtccctgcgcggcaggcaaagcagcgcggtacaaggtgcggcctgtcatcaacatcgcgcggctgggcatgcaaatcgccccctggcggccgcccatgatgtgggcgtgagtgaaggcaaacccttctttcacaaggcggtccaggtgaggcgtgcgaatggcggaattgcccagcgcgtggatggtatcgaaacgctggtcatcggccagcaggatgagcacattgggcggcggcgctgctgcggcaaccaccactattgttaaaaagcagatggccgccggaaggttgcgtaatcgtcggatcatgcctttttctatcaggctaccgccttgggggcaaaggcgaaaaccaagccaccaaatcaaggagatccgcgatttcaaggggtggctggcacattccagcgctcgcggtcggtgaggaagagttgctcaggaaagaggtcagcgtaggcatgtttgaggggaaagccttcaggaacctcccgccgcaaaaggcattgggcaatgaacatgccccagccctggttttcgccctgcacccactgggtgagaaagcggttgtccaaggtctgcggcgtcaaataaagcgccttgattggatgctgccggtggatcgcttggaaatcaccctcggaattaaggggcagccacacgcatgtgcggttgccgtaccatgccacggcccaagggatgtcactcatcatcaattcatccggttgcatccacgcggaaacagcctgaatgacccgcggcgcgtaaggcgggtaggccatcatgggcgagcgcggaggcagcagcttcaccaccaaaggtgccatggccaccaacaaaaacccgcccacgaacaatggccgcgcctcccataccgcggcgcgcgcctgatccaaaagcgtgaagaaaagtgccacaccgaacatgaccaccaacggtgtcatccaaaccaaaacgttttcggaggagacctcgcgcaacgtctggcgcggactgcccgacaacgcctgaacacccgtcaacaacagcaatgacagtagtacaaacaacctcaatcgcgacaacaccggtctgcggaaaggcaccagcaagccgacaagaaaaaaggcgctcacccatgtgccgccgaggcgcggcaaatcttccggcaccacctggcgcaggccctgcaccagtttcagcggcaaatccaacgcctccacgtgcgtaaaatcaggctccaaagaccgcggcaacgtgcttgcaggaaaactcggggtgccctcgtacaacacatagccggccgtgccgaagaaggttccgctcaattcataattccgccacaaccagggggccaccaccgcaagagacaccagcgaggtcataatcagcgccaaccagcggcgcacgccaagatgcgccagcacaaacaccaccaccggcaaggcaagccacgcgaaggcatagcgggtcaacacgcccagcccgagcaccaatccggtcaacgcgcccagccctgccatgcgccatccgctgcaaaactcctcggctccacgctccaaccacaccaaacaccagatcaaagccagcgcccacaccatgaccaataaggtggagccgccgctcatgctcacgcgccacaacaattccgtgcccatcaacaccaccgcggtcagccaggccaccccctcatcgaacaaccggcgggccagtgcgtaggccatccaaaccaccacgaaaaacaacacttgattgagaagcacgatggccagctcgggcaagggccgcgacggctttgcatccgccgcaattttgtcctccaaaggaaaaagtttcatcaagcccgacagcaacaccgggtaggccggaggataatgcaagtcgggcatgggctttcccagttgggcgggagccagcaggcggtcaaaggcctggcgttgttcgggagtccagcggctttcgtccggcggcaacttgcgacgcgcatcctcggccttgcgcacggcctgtttttgaagcagatgcacggccagcggatgaatgcttcgggtgacatacccttcgccgcgggccaggttgcgtgccaattgagcctgctccatggtctcgggcagttcaaagttgcgccaagcccgcacgtcataaatggcggccagccctgccacactgagcaataacaaggcaaacttcagcgaccggttgccggcgccttccgtccaatgataaatccattcctggatacccgacataaatgatacgctctttcggggcccgcgcctccacttgcgcaagctgtgcaagccaacatggagacagccccgccctcacgcaagttatttttgaaaaacttgaatttataaacgttctttgaaccagcgtcgcgttttttcccacatggccggcgtgtacacgtggccgaggccggagatgatttcattttcgaaatcggcctccgcatcataaaggcggtagatgggacgaacggcggcgtctatggcgcggatgccggagaccggagagccggcgtcctggtcgcccgtcatgaacaacatgggccgcggtgccgccaaggccacaacagcctcggtatcaaagtgccgcagcagcccgggcacataataataaatcccgtggtatttcagcccctcggcggcgatcaaatcttgataacgtgtgaggcaggccaccgccacaccggtcttggggcggtcatccaaagccatgatccaccaagtgcgcgtggcgcccatgctgatgcccgttacgccgatgcgtgccgggtccaccgccggatgggcggacaaatagtccaaagccatcaaatcatcccgcaccatcatcccccacaacgagcggccgtaccaaagttgaaacttgctggcgctcaattcaccagcgccgccccgctcggaggggcccccgggcccccggccattgcgctcgccgaaacaataagcatcaatggccaacaccacaaaaccatcgcgcaccaacgcggggccgggaggctccggcagggcgttggtgcggaacagttcttccttgcccacgtcgtaatgacctccatgccaatgacaatataaaatggccggtttgcgcgcagggccgtccttgggaatgaggaggtaaccggggacagtatcgccagcgccgttgtcaaaggtaaatcgctccaaggtgtagtaggtgcggtcttcacgcgagatggtttgaaccaccggcaccttgggacgaggcggcagatcccccaaggtggtccgaagggtggtgcggatttggcgtcgctgtttttcccacgccttgatgttggctggcgccttgaattccggcaccggcggcgccgattgcagccagtgctttccggcggacgactgaggttgtgccataagatgatgatgcaagagtccaaagacggccgacagaacggcccatttcaagtcaaggaatcgcataacaaaaaattacggtttgatcccatcaacgcaatgccaaaaccgaattaactcagaaatcaaaagtcaacggagccgggaggtgtacaagggcgttgccgattcattgaatcatatttgtggttacccaagcacagattttaaggctatctgccaatcgctaagagtcggccccctccctggccgcttccattgcgccttacatcgccaccagacgcacatgctcactttgatgttctcacgatgatgattgttttcattccgcgattaaagcttggcccgggcgatggcttttgctaacgtcccgcccatgccagagattgccaattacgtgagccacggggcgcgattgatcacgccggccatcatggagcgcgtgctgcgccaactccccatatggaaggttgagttcacccaaatcaacgcccccaagtatccccatctggtcacccagcttgaatttctggtggacgcagtggaggacttcgccgaaggcgcagacaaagacctcccctacgtcgccgtcgccgaggccctctttgccctcatgtatgcccataaaaaagtggacatcatccccgacttcatggcagccctcggccacgccgatgattccagcgtcgtccgcgccgccttgattcaaaacgaaaaggcatttgccgcctacgcccaacgccaaaagcgcgactggaaacgcatctccagcaagccttgagattcagcgcccctccccgctgcgggccggatcgcgtgccgccaaaaacgccaccaaatccgccgccatcttttcactaaaaccaggcacctcggcaatctcctccacacgggcgcgccgcaatcgctgcaccgacccaaactttttcagcagcgccgtcttccgctgctctccaatccccggaaactcatccaaaatgctctctgaaatcttgcgcaatcgcaactgggcgttgtatgcgttggccacccggtgcgattcatcccgcacccgttgcaacaacttgagcgccccccggtcatgcggcagccgcagcggctccgactccccgggccggtaaatctcctcaaattccttggccagccccaccaccggcacatccccaagccccagcgcctgcagctccttgaccgccgcgttcaactgccctttgcccccatcaatcaaaatcaactccggcatactcccacgcccgccctcccgcaaaacacgcgtgtaccgccgcctcaccgcctccgccatgcacgcaaaatcgtcctggccggtcacccccttgatttgataacgccggtaacccggcctgtcgggccgcccctccacaaaccgcaccaacgacgccactgccagcgtcccgctgatgttggatatgtcgaacccctcaatcacccgcggcggcctttccaatcccagggccgccgccaagtccgccaaatccgcctccggattcagcgccacaggaagattgtgcggcgtccgcgtaaatgtccgcgtcttgcgcgtggtttcctgtagagaggccagcaaatcccgcaactcggccgcccgttcaaactccagcttttgcgccgcctgccgcatctcctcctcaagccgccccgcaagctcctcacattgccccgccaaaaaatcacacgctgccaacacttgtgcgcggtactgttccaatgtcacgttcccaatacaaggcgcagtgcaaaacttcaaatgcccataaagacaatgcttgtaatccgcaggcccgggattcaacggccggcacccgcgcaaattaaactgtcgccgcaccagcgtcagcgtcgtccgcaacgcccgcccgctcggaaacggcccaaaataccgggccccatcgtccgttcgcagccgggtcaaagtgaaccgcggaatgggatcctgcagattcaccttcaccatcggaaaccgcttgtcatcccgaaaactgatgttgtaacgcggcctcaattccttgatgagccgcccctccaacaacaacgcctcaggctcgctccgcaccacgtgcacatccaaatccgccaccgcctccaccaacgcattcaacttcaaatcccacgccatccgccgcgacggttgaaaataggagctcacccgcttccgcaaatcccgcgccttgcccacataaatcaccgtccccaggcggtccttcatcaagtacacacccggtttgtgcggcaactgggcgagcttctgtctaagcgcttccgacaccggcatgcctccattatgcgccccattcccctccccgacaaccgcgattccacgcctattggccaagtttattcagaatttggctttacccttaaagcgattgacaaagcccctggagatgggaaatatgctcatcagttgcggttaatctcgcactgacgtgaattagatttgtccaacaacacaaggcgggattggctgtttttttgctttggcatttgacagaaaaataagagctattgtttgaactaatatcggtatgaaaattgtctctccacaggaagcggtcaaagtcattaaatccggcgactgcgtacacatccacgccatcgcctgcgtcccccacaaagtcgtccaggccatggtggaccgcggtcgcgccggtgaaatcaaaaacgtcaccatccgccacctccacaccgaaggccccgcccattatgtggagcgcgacctcgaaggcgttttccagctcaattcctacttcgtgggccacaacgtgcgcaaggccacccaggaaggctacgccgattacattcccgtttttctcggtgaaacccagcgtctcatccgtgaaggctacaccccggtcaacgtcgctctcatctctgtttccccgcccgacaaacatggttttgtctccctcggcacctcagtggaagccaccctcgccgccgtcgaatgtgccgacaccgtcatcgccaccatcaaccccaacatcccccgggcctttggcgatgccatgattaagaccgacatgattgacatctggtgcgaggacgatgcccccctcgtcgaggccaatttcgccgcacccaatgaagtcgaacaggccatcggcaaacacgtcgccgccctcgtcgaagacggcgccaccctccaaatgggaatcggcgccatccccaacgccgtcctggcccagctcggcaatcacaaaaacctcggcatccacaccgaaatgtttgccgacggcgtcctgccgctcgttgaaaaaggagtcatcaacggcaaggaaaaagccattgaccgcggacgcatcgtcgcaaccttcctcatgggctccaagaaagtgtacgacttcatccacgacaaccccgaagtcatgatgatggacgtcggctacaccaacagcctcgatgtcatcaaacgcaaccccaaggtcaccagcatcaactccgccatcgaagtggacatcacaggccaggtctgcgccgactccatcggcaccaaacacttcagcggtgtgggcggtcaaattgacttcctccgtggcgcctccctttccaagggcggcaaacccatcctcgccatgccctcgcagaccgacaagggcatcagcaaactcgtccccaccctcaaggttggcgccggcgtcgtcaccacccgcgccagcatccactggcttgtcaccgaatacggcgcagtcaatctttacggaaaatcactccaggaacgcgcccgcctcatcaccagcatcgctcaccccaaccaccgcgaaatgctcgacaaggccgcctttgaacgctggggtccccatttccactacatcccggccccctggaaaaaatagaaatcctcaatcattcaccccgcgcccggcccccaaagccgggcgtttttttatgcccacacttgcccccccgaggctggcctcaactttttaaaattccatttgatgaaatccgcccccgcattcgtctaatcccgtggacctatgaacaaccaaatcaatcgtcgtcgtttcctcaaagccggtctctttaccacggctgccctcaacattgtccccggcggagtcctcggccttaacggccaaacccccgccaacaaccgcctcaacatcgccggcatcggtgtcggtggccaaggccacagtgacctccgccaaatgaaaagcgaaaacattgtcgccctctgcgatgtggactggcggcatgccgctggcacttttaaagaatggcccgacgccaaaaaatacaaagattaccgcaagatgctcgacgaaatggaaaagagcattgacgccgtagtcgtcgccaccccggaccacgtccacgcctttgcaagcatcgccgccatgcagcgcggcaaacacgtctattgcgaaaaaccgctcacccattcggtgtgggaagcccgcatggtcgcccaggtggccaaagagaaaaaagttgccacccaaatgggcaaccaaggccaggcctccgaagaaactcggcgcttgtgcgaattcgtttgggacggcgccatcggcaacgtcctcgaagcccacatctggaccgaccgcccctcgcaaggattgtttaatgaatactggccccaaggcgtcgcacgccccaaagaaaccccacccgttcccccggatttggattgggatttgtgggtcggccccgcccccatgcgcccctaccatcccgcctatttgccgttcaaatggcgcggctggtgggacttcggcaccggcgcgctgggcgacatcggctgccacgccattgaccccatcttccgcgcttgcaaattgaccgcccccaccagcgtccaagcttcctccacccgagtcaacaccgagacctaccccctcggctccatggtcacctaccaattccccgcccgcggcaacatgccacccatgaaactggtctggtacgacggcggtttgcgcccgccgcgcccggacggcttgcccgacggcgtaaccatgggcgacaacggccgcctgctcgtcggcgacaagggtttcatcctcggcaaccgccttttccccgaagctcgacgcaaagaatacaccgaccctccgcgcaccatcgagcgctcgcccggccattaccaagaatggattttggcctgcaaaggcggcaaaacaccaggcagcaacttcgcctttgccggccccctggcagaagccgtgttattgggcaacgtcgccctccgcgtccaactccgcgaggaactcacccgcaccaagctgctttgggaccccgtcgccttcaagttccccaactgccccgaggccgacgcctttctcaaacgcgactatcgcgagggctggaaattaatctaaagccggagcctgttcacaccgccttcaaggcggcttgcaaatagcccagcgcatacgccatgccggcgtgccagggcgcagcacaactcatttgcggggcgtgatcgggaatgatcacccccgcaaaaccgtttcgcttcaaaatccgcaaaacctccaacacatccacatccccctcgtctataaaggtttccttgtacgtcggcaccttgccccgcacattgcgaagatgcacatacgcaatccgcccctgccggctgtacgcatccaccgcctcatacacatccccctcggtcatttccgcaagcgtccccacgcaaaactccagttgattccgcgggctcggcaccaaatcaatcaaccgctggtataaatgcggttgatacaccaaccgcggctgcccgcgcaccgtcggcatcggtggatcatccggatgtgccgccaacgtcacccccgcctcctccgccaccggcaacaccgcctcaagaaattcacgacaccgccgccaaagctcctccggagtggccgggggtacgttacccggcggcgcgttcggatcgtaaatcatgttccaaaccatccctctcggcatgggcttgtccatcggcccattcattcctaccgcctccgcccctccacgggcaaacggccccttcacccgcccggccacccccgcgatggaaaagttgtaacccataattggaatgccggcggcaccaagattgcggatgataatcttcaagttttcaagctgctctgccttgcgcggcccatccaacaaaacgtcgtgccagtgcgccgggtcaaaattttcaatggcctccagctccaaccccgctgcgttgacccgccgtctcagatctgtcagctcctccaccgtccacaggtgatgcgggtccccagccagcccccaaccggtgtcatcgcccaccggctggtcgccgggacgattgctgcgcgaagaccggaaataatccaccaaatgcgccacgatatgcgtgcagccgcattggcgcgcaaaacgaaaatgctcgtcatccaactgatgccggtaaagccccagtccaagtttcatgcgaagtcagaattaaaaaccaatgctcgcccccccatccaccggcagaataattccagtgacaaattgcgccgcaggcgaacacaaatacaccgccgccatgcccacatcttcaggcttgcccagccgccccatcggagtacggctcaatattttttgacgacgcgccggatcattcgccagcgccttctcagacatgtccgtctcgatccacccgggcgcaatggcattcactcgaataccgtgcggagacaattcagttgccaacgcccgcaccatccccacatacgcactcttggctgcactgtaggccaccacatacggaatcccaaacagcgatgccatcgaagcaataaataacaaactcccccgcccccgctccaccattcccggcaccaccgcccggctcagcgcatgcgctcccaaaacatgcgtcgtcaagacctgcaaaaactcctcctcagtcgtttccacagccggttttttcaaatgaatgccggcattgttgataagaatggtgatggagccatgcttcttttgcacccgctccacaaacgccggagcctcccccaattcatccacatcatgcactgcatagtccgccagcggcccaatcgtccgcacagccgcctccagtgcagcctgccggcgccccactaaaaccacacgcgccccggcagccgccaaacaccgtcccatcgccaaccccaaaccgctccctccccccgtgatgaccgccagctcattttgcagccggaaaggacaaggccacccttccaaatcacactcggacaccttcgtttgatgaatgttcagttgttcgttcatgatttcagcgccgcccgcctatggcgaacagcatcgggccggtaaatgtgggcacgttggcttcatttggcaaatccgaacctccccaccgcccccatccttcaaacctcatccccgcggccaaagtcgaaaccaaaacttcatcggcgcccgcaacaacaaatcccgcaaaagatcctcaaaccccgccgccttcggttccaccagccggcgcgtgctcaacaaagccgccaacgtcaccaacgccgccgccgcaaaaaagatgctataccgattccattccaccccggttgtttgatgccggaaatcaccgatggcatcaatcatcatgccccacaatatcggagccactccttgcgtgacgttccacgccacagaaaaaatcgcaaaaaaatggttgcgccccatcaccggcaccgacgccatcgccagccgcgtaaaagccatgttggccgaagccgcaaacaatcccatcgcgcccaacagccccatcaacaaaaccggcgacaccgccacgacgttggccgccatcaaccaccagccgcccaaaatcaaaacaaataccccaaacgccaacgccatcaccggcctgctccccagggcatccaaccggctgccaaacaaccaaagacttcccatccccccaaggtacaaggccgatgatagcaacaaaattcgcccctcggtcagcgctgcttccgtcttcaaataagccaccggaaacgcctgcatcccaccatacaccaccgcccacaacatcaccgtcaccaacaaccgctgaaacggtggatgccccaaaatggccccccacggcacttcccctgtccccccggccggttcttgcggcaccggcacatccggcatgcgcttgagaaaagtcagactggccgcccccgccaccgcgctgaaaacaaaaagcaaactgaaatggacaggttgaggattactccccaaaaacaaggcagccaccaaaaacaccacaatgctccccaagttgaccaccgccgcatcccgcgccaggtaacgcccccgaatctcttccgggacaaggctggtgatccacggcagccacgcacaactggaaatgccccgcgaaagattaaatccaaaaagcaaaaacaacagcagcgcaagctgcgtgcccttgtccaaaaatgcacccagcagcggcaccgcggccatcccaaaaataaacgccactcgaattccccatcctgcatacacaaaccgccggaaaccaagccggggaatgtattgcgcagccggtatttgaaaaataacgagcagcggcatcatgctgaccacaacccccaacaccgtggcgctggcccccaaactccgcgcatacaacaccatcgggctgctcagcacgatttgaaaggacagcgcgttgaacaacgcaaaccagtaagcgttacgaaaacccggaggcagtcgcggcgtttctgtcgttgttgatgttgaaacaggcatggaatttttggacaaagacgggcgcccacccatcaatatccccgcaaagccgtgcttgaccgcgcaggcaatccgggcgctggcgtccggcgaagcaccacatactcaatcccgttggcctcgcaaaacgcccgcttctccggtttgtcaccatcttcattgacggcgtaaatgtccgggcgcaaccgccgtatctcgggctcggcatccaaccacccccatcccgaagtaaccaacgcctgcgtaacgtgccgaatgctggccaccatataccgccgctcattctccgtctgcattggatggccttcccctttcaaatgccgcacattcgcgtcattccccaccgccacatacaaatccccaagcgcagacacctcctcaaaaaaccgcacatggccggagtgaagccaatcgtaacaacccgttacaataacctttttacgccccggctgaatcacccccattggcacctcgggaaaaccagccaacgcctcctcaggcaaaacatccgcccgccagccgtgctgctcacataactgccgccgctcacgcgaatcttcttccaccgggtaaacccaagccgccgcagccttgggtgccgcctcgggcacccccacattagcccccacaacttccacggcgctgacaaaccgaatggcttccacaaaataccggcgctcagccagaggaaatttgggcggacgccccgtcgcacgcaccaccgacgcgtcatcccacaacaacacatgcacccgcccccggcgcgccgcttcctgcaacaaccgcacatgccgggagcgcaagtcatcaaaagtccctgccaccaccactggaagttgctcattcatgcgttaaatccggatgcatggatgaaatgcgccgggtaccggttcctccgacaccacatacaaataaccaccaccacaccccgaatacatggccccggcataacgcgcttggtaatacttcaaaatggccttcaaatccaccgtcaggaacggatgccgcaccgtgttcggcagcagatattcccaacaatccatgcactcgttgagcgagcgccccaaggcccccgcatcccgtgcaagaatggccgcataacaatccttgcccgtttgcccaagccgccgcacccattccggctccaaacgctgctcgcccaacggatgataaccggggggccgcggcgcgatgggaagaatatgcaggacatgagccaaccactgcgcaatctccgaatcccggcaactttcaatgtgtttgggaaacagccccccttcatgcccggcatcataatccaaacgattgatcccgggataaagcagtccaatcatgtcctgcgaaccggaaggatcacttttgccttcgttttcggcgttgtaaagttcacgcaccaaaacggcaggctccccctccggcaggctatccccccacaattttcgcgccacagcacgtgtgcccgtggccaaaccagcccggtccatccaaggcggcaccggctccagattcaccaccaccatggagccgggcggcgatggattccaccgcgacacaaagggctggtcaatccaacccccggccaaggccagccgatagggcaggtttccccaaggtggtgttggtgtggccccaccggcaggcccggcggcatggcaaaagttggattgggagctgcccatccgttaatacaaatcccgtacggtgtcctcaccggcctggcgtttccggtattgatcctcaatccacttgtaagtggttttcaacccctcgcgcagcggtatggaaggctcccatcccagcatttgtttgatgaaagtattatcgctgttgcgccccgccacgccgcgcggagcattgagatcgtaatgacgcttaagtttcacaccaccgatttcctccaccaacgaaacaaggtcattgatggaaatcatctcgctggttcccaagttgaccggagtggccttcagcgcatcggtgtgcatgatcatgtcaatccccaggacacaatcatcaatgtacatgaagctgcgtgtctggttgccgtcgccccaaatttcaatctccagctttcccgtggccttggcctcgatgaccttgcgacaaatggccgccggcgccttttcacgtccaccatcccacgtgccccatggcccgtacacattgtggaaacgcgcaatgaacgtcgccagcccccgctcggcggtgtactcctggcaaaacatctccgacatgagtttttcccacccgtacccccgctccgccatggccggataagcatccgactctttcagcgcacggcagttgggatccttctgcaattcggtgttgtacgcgcaggcggagctcgaaaaaaaataccgccgcactcccgcccgccaggcatgttcaatcaaatgcgtgttaatcaaaatgctgcgcagacattccacgcgaaaccgctcaataaaacccattccacccatgtccgcagcgagattgtacacttccgcagccccttccacggcgcggcggcaattttcctcaaccttgaggtccaagctcaattcctccaccccgggaacccgctggtaccaatgcggcagcggcttccgatccaccgcccgaatccgctgataacccaagtctttgaagtatcgcaccagcgcgcccccaataaacccaccggcacccgtgacaacaatcaattcatccttggcggcacggttttccatccacggacgttcagttttcgcacaaggggctgagctggcatcagttttggtttgtgtttgcatagcctgtatccattcaaaagccgcgccaaactatcattgctcctccccgcttggcaatgaaggagatttcctcctttcgttcacaccgccgccctgctatccctctgatggcatggttgcgcgcgtgacacttgaaatcgccctgcgcaaagagttcgactacctcatccccgccgacttggaaccattggtcgaaatcggcacgcgggtgaaggtcccctttggcggacgcgaagtctcaggctgcgtcacagcgttgctcgatcaatcctcccacccacgcctcaaacctatcatcaaaatcctcggctcccccagcctggtcacccccaaagtgctggcgttggcccgatggattgccgagtactattgctgcgcaccggaagtcgccttgcgctccgttttgcccgaggccgttcgccgtgaaaaagcgggatggcgcgagcgcctctgggtccgtgtcatcccccgcttgggcgaaatgcccaaattaactgcgcgccaggaggaagtctggcgcgtcgtggaagaaatgcgcgccctgccaatgcaaaaattggcagccttgaccggcgccacacctcaaaccatccgccgtcttgaagacaaaggtttgattaccatttcacccgaagtggacgaacgcgacccctatgccaccgaactgattctgcccacccaacccctccccttgaacgccgagcaggcgcgggccttggaagccatcacccgctccatgggccagcccggccaaccgcccccggacaaacccacagtctttctgttgcacggcgttacgggcagcggcaaaaccgaagtttatttacaagccatcgcttacgccctcagccagggccgcggtgccatcgttctggtgccggaaatctcgctgacgccgcaaaccgtcgagcgtttcaaggcccgcttcagcagcggcccacatcaaactctcgtggccgtcctccacagccacctctccgcgggtgagcggcatgacgaatggcataagatccgccagggccgcgcccgcatcgtcatcggcgcgcgctcggccatctttgctcccgtcgagcctctcggcctcatcatcgtagatgaagagcacgaacactcctacaaacaggaggaagcccctcgttaccacgcccgcgatgtggccgtcgtgcgcggaagccgcgaaaacgccgtcgtcgtactcggctccgccacgccatccctggaaagtttctacaatgcacgccgcggcaaatacgtcctcctggagctgccccaccgcgccgacaacaaaaaaatgccggtggtccgcgtcgtggacatgcgggccgagctccgccgcgaacgcggacagctccaggtcttttcacaatcgttgcgcgatgccatcctgcggcgcctcgaacgccacgagcaaatcatcctcttcctcaaccgccgcggttacgccaccgccctggagtgcccccaatgtggctacgtcgcccaatgtccccattgcagcgtggccctcacctaccaccgcccacaagcccaactccgctgtcacatctgcggttacaacgccgaagctcccacggcctgccccaacgcacaatgccgcaaccccgccattcgcttcgcaggcctgggaacccaaaaagtggagcacgtcctcgctcgcctcttccccaccgcccgcatttgccgcatggactccgacgtcctccaaagaaaagaggactaccggcgaatcctcggaaacttcaaggccggcaaaattgacatcctggtcggcacccaaatgattgccaagggcctgcacttcgaaaacgtaactttggttggcgtcgttcatgccgacatgggattgcacctgcccgacttccgcgccggtgaacgcacttttcaattattgactcaggtggcaggccgcgccggacgcggcgaagtcgaaggcgaagttttcgttcaatccttcaccccctttcatcccgccattcaatatgcgcgccgccatgattttgcgggtttcttcgagcaggagctcgagttccgccaacaactgcgctaccccccctttacacgcatggcccggttgctttggcgcggacgcaacgaagaaaaagtggccttttttgcagagcaatgccgcaaaaagctcgaagcgttgactcaagagctccccgacttgatggtggccggcccagccgccgcacccctggcgcgagcggagactttttaccgttaccatctgacgcttcgcacccgccaaatgaccaagctcagctccgccctggcaacgttgttgccaaccatgcccttgcccgaagacgtaagccttgtcgtggacgtggaccccgtcacgttgctttgactcaccttctttaactcacagctcacctcttgggcaaccggtcgaaagcctccagcgccacctcccgcgcaatggcatggttgacaatcggatgaggataagtccgccccaattccacaccggcctgcttcagaacatcagcaggcgcctcccatggccggtgaatccatgtctccggcagaccggcgagctccggcacccaccggcgaacatacgcgccacccgcatcaaatttttccccttgggacacaggattgaacacacggaaatagggcgccgcatccgcgccgcaacccgccacccattgccatcccagcgtgttgctcgccaaatcggcatccaccagcgtgtcccaaaaccatcgtgctccgtgccgccaatccaccaaaagatccttcaccaaaaacgatcccacaatcatccgcacacgattatgcatccatcccgtagcccacaattcccgcaaacccgcatccacaatcggataacccgtccgccccttctgccacgcccgcaaaacctccccaacatcctcccgccacggaaattttttgaagttgggccgcaacggctcctccggtgtatggggaaaatgccacagcaaatgatacgcaaactctcgccaccccagttccgtcataaacggcgaatgaagccacgccgcatccgcgggacgctgcgcctccgcccaccgacgcaaccgctgcccgatttggcgcgggctgatttccccaaaatgcaaatgcggcgaaagccgcgaagtccccacctctgccggcaaatttcgtccctcggcatatcgcacaaatgccgactgcaaaaaccgctccaactgccgctccgccccctccggcccgggctgccacgtagcgcgcaatccaccggcccaatccaccttgggctccaattccaactcttccaacgcaaccgatttcggccaccccttgggcgcaggcaattgctctggcgccggcagcggctcggaaaaaagtgtcgcttgcgtcaaacaatgtttccagaaaggcgtgaacacttgaaaaggttgcccgctccggtttttcaccgtccacggctccaacaacaaagcagcattccagctctccacctccaccccttgagcacgcaacgtttccttgatgcccttgtcccgcttgatgatcgcaggctcataacgccgattccaataaaccgcatcagcgcccgtttccttgatcaacgcttgcaaggtggccaagctcccccctctccgtatcacaagcccactgccccggcggcgcagtccatcctccaaagctcgcaacgatggatgcagccaccatttcgacgcaccccccggcggccaatctccctcttcctcaggcgcccaaataaaaactggaatgaccggctgcccccgtcgggccgccgcgtgcaaagccggctgatcttcccaacgcaaatccagccgaaaccaaaccaaggtggcactcatgatttcccctaaacaccaagccaatggataattaacaaacgccggttggatacccgcccatttcaaaaacagttcccacgaaataatactagtgcctcaacgtcgcttttccaaaccacgcccccgttgtatgagcagctcgcggctgtcgggcggcacgtcatatttctgtgtctctccccacggccaccgcacttccactgcttgagtgtccgccggcaataacaacaccgcgctgtcctgtgaataccatcccccgcccgcatgaacttcccataccggccccgccgcattttgacgccacgcacgcacctgcgccccaacacctgtcggattcatcggccccgccgataggcgcactcgcaaaccaggccgtgcactgacgttccgataaagccgcgtttccgccccgttctgagtcacggccaaatccacccgcccatccccgtcaaaatcagccaccgctgcgccacgctgttcaccatacactttcacgccggtccgtgtgccctcagccggttccagttttccctcgcccgtgttgcgcaaccacaaaccgcggccggcatccaatcgcgtaacccccgcctgcgtggcaaaaaagttctgactcaaaaaaacatctggccatccgtccccgtccatatctgccgcgcagacactccacaccggcgcccattgagccatcggtggcaacggcgcaacttcccagcgttgggcccgattgaggaaacgatgcgtctcaagcgtcaccgctttgagctcatgcgccgtcttgaatttttccccaagcaaatcagccacagtggccttggcgtacaaggcatgcttgggatacttaggcgcaagaaaaggcagccccactttgttatccgtcaacggcctcctcggcaccacccgcccgggtgtcagctcctcgtaagcctccaacaaatccacctgtcccaaaccattgaaatcgccgtaataaagccgcgcaggaaactttggcgaagcctggtagtggctgttaagcccccaatttccagctacaagatcaagccgcccgtccccatccaaatccaccgccgccaaacccgtccaccatcccgtccatccctccaaccccagctcccgcgtcacttccttgaatgtgccctgttcattgaagaaaacccgcaccggcccccactcacaactcaccgccaaatccggacgcccgtcttgattgaaatccgcaaatatcgccgccgtcaccaaaccaagctttcggaaaaccgccgcatgacgtgcatccgctttgagcaccccttgctcattcaagtacaattgcgaatccaccggctcaggatatcgcccgggggaaacacgcccccccatgaacacatccaaatctccatcgccgtccacatccgccgcagccaacggccccacactttgccctttttccgcaggcaagacggtggaggcccccccttgcacagcaatcagagccttgctgccctgccccggctccaactcccaactggacatccccaccaccagcgcccgctgtgtcggcgcaagctggatgcccaacagcgacgtcgtatcctggttttggattccgcccatgtccggcaacagcgtccacccccctttaccgtcattccggtaaatgctgattttccctccagcgcccgtacccacaatcagatcatcccaaccatccccatcccaatcataccacgtcacccccggcccggattgactcagacggttgggcaaaagcggctgccgcgcaaaatcatcgtaagccacttcatgatgacgatgccccagtttctccgaaacatcctcaaacatcaacgccggcggcgcagcccgtggtggcgccggatttgccacggcgctggattgggcaatttcataaacccgattgggacgcgcatccgcaatcaccgaccgctgtcccccgggccacaccacttccacagtcagacgctcagccgagcccgccgcaaatgtgcggaccgtatcatcacatccgagataacgccccccggccaacatctcctgaaactgcatcggcaccgctccgccacgcaccgttacccttgcattgatgccataggtattgggcgcaagcccgcgcaaacgcaccgccacccgcggcgccggacaattgttccgataaaccagtgccggcgcattcaaacaattcaccaccacatccaaatccccatcgttgtccaaatccgccatcgctatcccatgcgaaatctcttcggcatgaaatccccattgcctccccacttcttcgaaccgcaggttaccaagattccggtaggcgtaattcggacttaaatacggtggtatttccagtagccgcgcccgaaattcctgcaggttgcgctcctgcgaaactgtccccgctgcatcgagcatgtccatgtcattcacattgtgggagtagccggtggtcaccaaaatgtcctcaaacccatccaaatccacatctaaaaacgccggcacccatgtccaatccgacgccgccacctgcgccgcatacgccaattccgcataggtgccatcaccccggttccattgcaaaacattgcgcgttgtcagtatccggttttcaatcgcacccacaggcggatggacaaatttcatgccggtaagctggcgcatcagacggtcatgcgtggtgggtttcatctccgtacagaacaaatccagcaacccatcccggtccaaatccccgaaatccatccccatgctcgcaaaacacatcgtccgcaccgccagccacggcaccgcccgaaacacccctcccccttgattcaaccaaaacctgtccggcgtgtgaaaatcattggccacatagatgtccacccgcccgtcgtcgttcaaatcacgcaactgcaccgtaaatccgtaatccatcaaattggtccggatcggctgcccattctcatcaagaaaccagttcgcccacgattgaaggacaaaacgtcccccgccttcgttgatgtacaaatcatcctgctcgcccacctcaatcaacatgttcccctcgattttcaatcgccgcgcccaacgccccgtgaccacaggacggccattcacataacgcaccgagtaattgcccccgccgcgaagtatggtctcctccccgtaattggccacatacaagtccaagtcgccgtccccatccaaatcccccaaactggcactcgtacccccgcgagtattcgtgaatcccgtatccgtcttctcggtaaaatgtccgcgaccgtcattcagaaaaagccgggcgccccgtccattgaatgtcacaataagatcaaggtccccatccccctccacatccgcaaagacagccccgcggctcaactggttcaccagccccaacccgctgctcgccgtcacatcttcaaatcgccagcctcccaagttgcgatacagggtattggtgccattaaggctgcacaggtaaatgtcacaccacccatccccatccacatcccccaaggccagccccgaaccattgatcaaattggcatttcgggcgtcactttcgggagtaagcaggttgacaaatgcgatgctggtttgttggggcggcatccgggtaaatccggcggagaaatttgtggcaaaagacaaatcgcgatacttgtaaccgttggcgactttccagtccaatgccggagcacccatcaggccatcgctgaccagaaggcaacacgccaacatcgcccattgtccggccttcccggcagaaagccgccgattgcgcaccattttttgcatcattacgggtaagtagcgcccgcaaatatgcccaatcgcaagggaaagacaatgagatttggtctctttccacgcacaaattcactgttttccgcaaaaacgcccccttcaaggggccaccgtcagaccagagggagccctcaagcggtagccatcggaaaacgtcaccgtcaacggcgtggtttgaaaattataaaccgcatacgtcttgcgcccctccttgcggtacacattgaaaaaaggataatccgccgtcactcccgtgtcattgagccccaaacggtcaagggtgtgaatccattgatacataaaggcgcgggtattgccgctttcaattttgttttccgggtgcgcctccaaatacgcagcagcagccgccggctccgccaacgcgcggaacatcaacaccaaatccccccaacccgtgttgtaatcgctcccccctttgcgccgcgccacaatccgatcatggttctttttcacatacgccggagaccgccccatataaacactggccggcgtaaacggcaaccagttgatgccgtgaatgcaatctatgtccccggaaaaccacgtggcaaatgcccctttgccgccccacaccatccccaacgccacctccggaaaatcctttggaaaattcgtgcccgccacgtcaaaccagtattcctccaccgcagtccgctcgatattgaacaaggccaaacccgtatcccgcaaagcacgattgccggtggcctccccccacaacatcactccataccacgcattgagcgactcactcgatgactcctgattgttgccatcggcaaaattcgcatcgcccgatgcccacgagtgccccgcgtatttgtcaaaacaacgcaaataaggaaacatggcatcccgcctgtcggtcgcggcaatgtcacgaatcaacatttccaccatcggcccccaacgccgcgcccaccccgcatccttccgggccacctccgctgccgcgcggatgaaatagccgtaatgaaaatgatgatcattcagtggtaaatcgcttccgtaagatggccggctcccaaccagcgttccccaacgtgcattgtaatagaataccacctgctccttcccgggcatagcgctaaaccattgctccaaacgccgcttgagctcgccaagaaagacctcctgcaattccggcgcccccgcagcctccgccaccccgctcaaagtcgccagcttgccaaggtgcttcccctcccaataagtatccccaaacccggccggtttcttgccggcctcagcccgcaaaagctccaccgccttctcgcggctggccagcccctgcccgggtaaaaacggcagcaatccctgcacgggtatctgcgtggtaaatccagccccctcgcccactttcatcaatccccgtaccgaattgtagctgagctccgtcaacggactgcgcacatatttccactgatgcggatacaaggcaaaaatcgtccccacgtcagccccctcctgcggtttgaacgcataccggtaagtcgcgcgcacattcccgccttcatgcacatactccaaccgcgtatccaccacgtggttgtgggcaaacctggcaaaacgcgccaacgtctccggcttgtcatccggcaaaaccgccaccgtaaaatacgttttgcctccggcaaaattggtccaacttcgcccctccaatcccgcccaagtcgagcctcccggaccaaaaagcccgtaatgatgaccattcaccgtgatccccagcgttgcctcccgccccgtgccgctccacaaccgcggcgtctgcgaaaatgtcaccaccggctgcccatcgctataaacacaatagacatacggactgccatgcccaaagctcgtgcgcaaccgcgccttgttggtctcaaaaacaacgctcacaaaccaatccgaccaccccccgcacaacgcctcgggaaaattcgccgcagccgagtgccccaacattaaatcgccctgccttccgccgccgctgccaaaaatccccgccgaggttgcgctcaccctggccccatgctggcttattgccagtccgttggaggtacaacgcagcaccaacggatgcgcaaaaagattctgcgaatacggctgccacaccaaagaactccaccactgccctgtaatcatcgggcctcgcaaatcctccgtgcgatatatccgctccggcagtgccttgcagggacgcggcgccgaactgaggtaacctccctcacccactttgatgaccgccgacccgtcgggcgtcgccgaaaaacctggagcccctcccaccaaaagcactacccaccccaacaatccaaaacgcatcacacgcagcagactgcccccatggtgaatcataaaacagcggatgttcatggcgcctacctttaagaatttcggcgccatttgtccaaacaaaccaaaaaagccagcggcccacctcccccccgaagacctcaaccgccctgctcagccctcagccaccggccacaatcttgactatctccagcctgtcgccctcctgcaaccgccgctgcccaaactccgagggcgcaagcgcctccccgttcaactccaccaccacactgcgcggatagaacttttgggccaccaaaaactcttccaccgtgcagggaagcacggcctccacagactgtccattggcaataacttgaggcatggcccactcacacccccgccagcgcctccgcaggcgcagcggcaatttcatccatcgtcaaatagcaacccggatcttccgcccacggatccccaaatacctgctcggcacgcacccggaatccgcccccgcaaatctcctgaaaacggcaaatcccgcaccgtcccttgagcaaaggccgccgattccgcaaaccattcagaatcggatgatccgttcgtgtccaaatcttgctaaacggcgtctccttcacattccccaaggttaccgactgccaaaactggtccggatgaacattcccctgcgtgtcaatattcccaatccctacccccgaactgttcgcgccgccgccgttccacttcaacaaatcataaacttccttggcccgcggcgattgctcccgcaagagccgaagataaagaaacgcattatccgccggctggtccaccgtcagcacctcccgcgtctttccgttctgattccattgcatcgtgcggtcaatgatccggtcaatcgccgcccgtgtccgggccggcggcacactcacaaggttggctccccgcccgctgtacaccaaatggtaaaaacaaacccggtcaatgttctcaaattcaatgaaatccaagatgcgctccaaatcatccaccgtgttgcgcgtcagcgtcaatcgcagccccaccttttgccccaccgccttgcaattccgaaacgcctctatcgtcttttcaaacgcccctttcttgccacggaaataatcatgtgtatccccaatgccatcgagcgaaatccccacgtaggaaaaacccagttccttgatttttttcgctgtggacaggtcaatcaacgtcccgttggtcgaaagcgtcaatcgcagtcccttctgcacggccctcgaagctagatcaaaaaagtgcggatgtatcaacggctccccacccgacaacaaaaccgccggcaccttgaactccgccaaatcatcaatcaccgcgttgcattgctccaacgtcaattccccgggatacacctgtgccgtggaatccgaatagcaatgaatgcaattcagattgcaccgccgcgtaatgttccaaaccactatcggccgccgctcagacgcagaacgcggggccccgtggccctggccatatcgaaggtgatcggcgggctgggccacgccacaatacaaacgtgtcagattcagcatggtactaaaatactagacttcaacagtgccctccttacgaggccgcaggcgcaggcgcagccgcaggatggtattgcggtgaaacgtaggcgcacaacggctcctccccaagataatcgccggtcagcgcataagcacgagcgcgcgagccgccgcaaatgtccttgtactcgcacaccccacatttgcccttcaaaagactggaattgcgcagattgcggaacacttcatgattccggtacacctcaatcaattcatccgtacgcgcattcccgcccgtaatcggcaaaaatccgctgggctgaatctccccaatgtgggagacaaaaacaaaccccttcccatcattgatgccaatcggagcgcgctttttcagggccttctcgtcatgcaattgctgcaacaccacccgccggtagtgatgcccctcggttgtcttgatgtcgtacggcacccgcgtggacaaatgcgccagcttgacgaacaactcctccatctcaaacgcattcaacaaatccgccaccttcccccgccccgtcggcacaagctgaaatacactccacaacaccggcttgatttcctcaagcagcttcacaaatccgtcaaactccctgaagttttgcttcgtaaaggtcgtgttcacctggacttctatcccagcctcacgaatgttctgcagcgcctgcatcgtcatgtcccacgtccccttgatcccgcggaaacgatcgtggctctcacgattggccccatcaatgctgatggaaatgcgcgcacaacccgcctccttcagccgcttcaaatcggcctgcaaaaacagcggcgtcacactcgggctcaacgccacccgcaaccccttgcccgtcgcatacgccacaatgtcgtacaggtccggccgctgcatcggatcgccacccgtcaaaataaaaatcgccggacgcgcccgcaccacctgatccacaaaacgatacgcctcctcaccatccaactcctgcgggtgacggtggaccttggccgccgcacggcaatgccggcacaccaacgcgcaggcgcgggtcatttcccataccaccaaaaacgggtggtcgttaaaatcaaacatcggttgaccgagcatcggtatcatatctacttcgtcggccgccaaacggccatgactcacatcaagcttaacgccgaatagtttcgcgtgcaatgaaatgagtcgaattcgccaaaaaatggtcagccacctcatcccctgcttctaacaccccccacaagaggccagatggagaagtgaaaaaacataaaaaaaaatttttgacaaaccgagcaagcaagccatattaacgacagatttagtcgttattaggctaaaccaattaatatcaacgcatggccgaggggcttacggggccttcggctcatttaagtcgtctaatgacgacataattagtcgtatatgcagaacaacgccattgagccaaagctctcgccaaacgaggctctcaaagcctcttcccccaccctcgcaggcacgttggcccaaaccttggccgaccctcaagccgaccatttctccgaggaagatgcccaattcctcaaattccacggttcctatcaacaagacgaccgcgacctccgaaagcagggcaaaaaatttattttcatggtgcgtgtacggatgcccggcggcgttttgaaacccgagcaatacgtcgcactcgacaagctggccaccgattacggcaacgattccctccgcgtcacctcacgccagggcatccaatttcatggcatcattaaaaccggccttgcccgcaccattcgcggcatcaacgaagtcatgttgaccaccctcgccgcttgcggcgatgtcgtgcgcaacgtcgtaacaccgccgccggtgctgcacggtttggtcggcgagcaggtcctggacgatgcccggctgctctccaaatctctcttgccgcagactccggcttaccatgaaatttggctcaacggagaaaagctccaactggaatccgaagccgcaaagaactttgaagaccctctctatggcaaaacctatttgccacggaaattcaaaatttcctttgccattccaccggtcaatgacgtggacatctttgcccaatgccttggcttcattgccatccaagaggacggcaaggtcagcggttacaatgtcgtggccggcggcggcatgggccgctcgcatggcaaccaccagactttcccaagactggccgatttaatcggctacattccccgtgaggcggtggaagccacggcctgggcagtcgtcggcatccatcgggatttcggcgaccgcgccaaccgaaagcatgcccggttgaaatacgttctcgctgatcgcggcgtggactggttccgtcaacaattggagcaacgcctgggcttcgcactggaaccggcacgccccttcgtcttcacccgccagggagacctctacggatggcggcaacaacccgacggcacttggattttgggcatgttcatcgagaccggccgcatccgtgatacagaatcgcgccgtttgaagacggccctgcgccaggtggtggagcaatttggattggaagtccacctcacccccgccaacaacctgctgcttgttggaattcaagacaacaaacgcgcagacgtgacccgagtgttggctgagcacggcgtggaccctgcccaacgtgtcagcgccgtgcggggcgcctccatggcctgcgtcgccctgcccacctgcggcctggccttggcggaagcagagcgttttctcccccaattgatgacgcacattgaagaagccatgcaagaaacaggcctggccaacgatgaaatcatcatccgcatgaccggctgccccaacggctgcgcccggccgtacatggcggagattgccctggtgggcaaggcgccgggacgctaccagctttttgtcggcggcaatcccgccggcacccgcttgaaccgtgtgtacaaagacacggtcaaagaaactgaaatcgttgccgaactaaaatccctgttcgagcgttaccgccgggaacgcctggccaacgaacgtttcggcgacttcgcagcacgagtcttgtggcttgagaacgccgctcaaaacaatcaagcgcccgcggtggtgggctaacccatttcgaccatgttaaccgaagtagaaataaaaaactggaacgaccactggaagggcaagccagtccaagaactggccgagtgggccatcgtcttgggacgcggacgcgcagtggtcaccaccaatttccgcccttacgaggccgtgctgttgcatctgctcacgcgtatccagccggacatccccgtcatttgggtggaccacggctggaatcgccccgccacttatcgccatgctgaagatgtaacacgccgcttgaagctcaatttgaaagtgtacacccccaccatgaccgtcgcccgctatcaggccctgtacggcgacccgccccaccccgaccaggaggaggccctgcgccaattcagccaaatcttcaagctggaaccctttcaacgcgccatgcgcgaaatggctcccctcgtctggctgacagcgctccgccgtcaacaaaacccgcatcgcgccggcatggatgccatctcactcgatgccaatacggggcttttgaaaatcagccccctcctggaatggacggattcagaaatggacgactacctcaaaaaacacgatttaccggtggaatgggattacttcgacccggccaaaggggaagaaaaacgtgaatgtggcctgcatgtccggtgggaccacgcccaaacggggcgttaaacctcccgctcattccttgaagacactcggcccatacacagcaagcacatcgttaaaccctgcacccaaacttttcgatccatgaccagctatcacttggaccatttgcaacacctggaaacggaggccatccatgtcatgcgtgaggtggccgccgagttcgagcgcccatgcctcctcttctccggcggcaaggactccatatgcctgcttcgcctcgcagaaaaggccttccgcccttccgacatccccatgcccctcctcaatgtggacaccggccatcactttccggaattgaacgaattccgtgaccgccgcgcccaggaattgggagccaaactcatcgtccgtaaagtcgaagacgccatcgctcaaggtctggccacgcccgcccccggcgaaatcagccgcaataaactccaaatccctacccttctggccgccatcgaagaattccgtttcgatgcctgcatcggcggcgcacgccgcgacgaggaaaaagcacgcgccaaagagcgtttcttcagcttccgcgatgccttcggccaatgggaccccaaaaaccagcggcccgaaatctggaatctttacaacgcacgcgtcaacccgggcgagcacatgcgcgtctttccgctcagcaactggaccgaactcgacgtctggcaatacatccgtcgcgagcgcctggaagtgccctccatttatttcagccaccgccgcctctgcgtccgccgcaacggccaatggctgcccgtaaatgatttcttgcccccgcgccccaacgaagaagtgcgcgagctcgtcgtgcgcgtccgcaccatcggcgacatcatcagcacgggcatgattgaatcccgtgctgacagcctcgaagacatcatcgccgaaatcagcgccgcgcgcgtcacagagcgcggctcccgcgccgacgataaaacctccgaagccgccatggaggaccgcaaaaaagcaggctatttttaagggttaaccaagggactgaacatgcaaacctcattgtcaacagaacccaaaagcgccattgccatcggccactccgccgaacactcacgccccgcgggacacgccgtcgaaatcctccgcttcaacacctgcggctcggtggatgacggaaaatccaccttgatcggccggctgctctacgattccaaatccttgatggaagaccagctcgaatccctcgagcgttccgccgaaattaccggcggcggtcaaatcaacctggccaacctgaccgacggcctccgcgccgaacgcgagcaaggcatcaccattgatgtcgcctatcgctacttcgccacaccccgccgcaagttcatcgtcgccgacacgcccggccatgtccaatacacccgcaacatggtcaccggcgcttccacagccaacctctccgtggtgttggtggatgcgcgtcagggcgtcaccgaacaaagccgccgccacaccttcatcgcgtccttgttgcgcatcccccacctcatcatcgccgtcaacaaaatggatttggtggactggtccgaggaccgtttcctcgaaatccgcgaggcctttgaggcattcctgccacgccttgacatcaaggacgtgaaattcatccccatcagcgccctcaacggcgacaacgtggtggagccctcccgccacaccccgtggtattgcggccccacccttttgggacacctcgaaaccgtccacatcgccagcgattacaacctcaacggcttccgactgcccgtccaatgggtcaaccgcccccaagccccccgggacccgcgctaccacgacttccgcggttacagcggccagattgcaggcggcattgtgcgggttggggaccccgtcctcgtgctccccgccggcctcaaaagccgcgtcaaagaaatctggacctacgacggctcactccacgaagccttttgcccgcaatccgtcaccgttttactggagcacgacattgatgtgagccgcggtgacatgctcgtgggctttgatcatctccccggaatggacaacgatgtcagggcccaagtctgctggatgaatcaccggccgctccaggccggccgcaaatacctcctcaagcataccacagccacggtccaggccgtcgtcaccgacattgaacaccggatgaacatcctcgcctttgaaccggagccggccaccgagcttgctttgaacgacattggccaggtccgtttgaaaacctcccgcccgctcgtctatgacggctacgccaccaaccggctcaccggcgctttcattttgatcgagcccggcaccaacgccaccgtggccgcaggcatgttgctcccgccccctcgggccatcaccccggaataccacgactttattatttaaaactaaggattgggcgcagtctcccgcagcggcagcgccccgggcacgttggaaaaatcaaaatccaccaccgcctccgcggcaagagtggccaccaccgatcgcaatttgaccacattgccaccggtggggtgattgcggttggcatacaacaggacaaaagtccgcgaaaacggatccacccacaggctggtgcccgtccaccccgtatgcccatacgacccaatcggaaacaccttgccccgcggccctgcataaggcgaatcaatgtcccatcccaatccccggcgcgcactgccatccgccggcgattgcaccgacgtcatcaatttaatggtctcttctttcaaaacgcgccgcccatccaattcgcccccattcaaaagcatgcgacaaaaacgcgcagtgtcggccaccgtcgtaaaaagaccggcatgcccagccacgccccccatccgtcgtgccgtcgggtcatgcaccacgccgcgcaacaccactccccccacccgttcagtcggcgcaatttcccttttccattcctccggcggcaaaaaccgcgtctgcttcatccccagcggctcgtaaaatttttcgcgcgccaagtccgcaagagattttccggaaacccgccgcacgatttcaccaagcaggatgaaattgacatcgctatagcgaaacaccttgcctggagccggattcggccgctcgctcactgcctgagcaatcgcgcccgtgtaaccgttgaaatcacggcgcgtcaaccccgacggcaaccccgagtaatgggtcagcaacagtcgcaccgtgatcgcctcccgcccttgtccgacaaattccggcaagtatttggacaccggctcatccagcccaattttgccctgttcccacagccacatcacgcagggcgttgtggccatcaccttggtcaacgaggccgcatcaaaaatggtgttggtggtcatcggctccggcgcaggaatcacggcccgctgcccgtaagccttgatgtacgccgtgccctgccgttcaatccatacaaccgctccgggagtgtcaccgttggtaatggccgccgtgatggcctggtccagttcaacaagtttctccgcgcgaaaaacttttcccgacccttccgccgctggcgcaacaggcgtgctcaacacccagagcaggccgaacagaagttgaagaaaagcccgccggctcaggcttggttgcgccttttgctcatggtttgaaatcggcatcattcaatagattagatgttacgcagcctgaataagttaccatttttcaagctgttggagctccttcgcccaagccgccttcaatccccctccccctcgtcctccccggctccgccgttgccgctgccggcattgtactcgtgcaacttgttgcgcaacgtgcgcacactgatccccagcagcttcgccgcgtgggtccggttgccgccgcacttttccaacgcggccaaaatgtgtcgcttctccagctcggccagcggcaccacttcaggagtggtggctgcagcagccgatgttggggcaggagccgctgccgctgcggcgggagaaggctccacggatgctggcgttgcgctcaacgccgacgtccgcatcaaccccaaatgctccggctcaatcatcccgctgtccccgcacagaatgacggcccgctcaatgacattctgcaactcacgcacattccccggccaatcatgctccatcaaggcggactcgctggccggggacagtcccgcaagtttcacaccgtgcttgcgcatgaagcgttgcatgaaatgccgggacagcagcaggatgtcctccttcctctgccgcaacggcggcacaagcaccggaaccacattcaaacggaaaaacaaatcctgccggaactccttgcgggcaacactttgctcaagatgccggttggtggtggcaatgacccttacatccacccgcaccgtgcggttgccgccaacccgctcaaactcacgctcctgcaaaacccgcagtagcttggcctgcaccgccggcgatatttcgctgatttcatccaaaagaatcgtgcccccatgcgccagctcaaaacgtccctcacgcttgctcaacgcccccgtaaaggcccccttttcatgcccgaaaaactcgctctcaatcaggttttccggtatcgccgcgcagttgaccttgatgaacggcgcgccgttgcgtggactttgctgatgcaacgctcgcgccaccaattccttgcccgtcccgctctcaccctgaatcagcacggtggcctccgtgcgcgccacccgccggatgagctgccgcaaatcctccatcgccttgctctgccccaaaagctgcgacgcatcctcatcctccgcctgccggccgtaaaattggttgacccgcagcaactgggtgaactctgcagccttccgaatcaccacctccaactgctccgcgctgaacggcttgataagataatcaaacgccccggccttcatgcactccaccgccgattccaccgtggcgaagcccgaaatcatcaccaccaaaggccgcacgggacgggtgttgagccgcttgagcaaatcagtggcatctccatcgggaaggcggatgtccgcgatcaacaagtcgaaattgtcccgcgccagataatcctccgccgccgctatggtttccaccgcggccacgtcataccgacgtgaacgaagctgctgctcgaggtttttgcggacaatcaggtcgtcttcgagaacgatgattttctcgatcggcatgaggccattatatcaagcgacctggtgtcggcgatataattctgaaacgtacccctgcccggataccggcggcggcgtgggccagtgttgcggcggcaccaaccccaaacgcaaccgcgcttgttgattctcgcggtccaacgtcaaaagccgcaacaccagcccctgagtctcttccaacagcgcccgcagctccggagacatcaagcgcctttcctccggctttttctcccatgcctgcctctgctcccgcaggtgccgcgtgacttcctccagccggggcagcaattgccgccgcaccgcatcggctctcgccaacgcctcaacatcgccgttttgcaacccaccggcctctgtctcaaaagccgccagcaattcccggcacaattgccggtgttcctgcaaattttgaacaaccgcttccatcatgaagggggcactggagtggacatttccggtggcgtctgactggcatttcccttgggcagggaccgcgtcggcagcatgtgctccgcctgagaacgccattgcaaaaattgaatccgccattgcgccatttccatcaacgccttcaaccccggcgtcggcgtgtcgctcattttacccgccagcgccactacctgttgataataatcacgcgcccgctccggctgtttcatgtgctcgtacaccagcccgatttgatacagcactggcccctgccatcggggcgacggatccaaattcaaaaggctcaagtaaatttccagcgcattcagaaaatcgccctcttgatacaattggttggccagctcgtttcccgtccgctgctgccaataggcccagttctgcgggtttttcgctgcatcccgccgctgcttctccaacagcgccaaggtctgctgcaacgcctcccgattccgccccaaacgcttgagcgaagtggccagcaaaaaccgcacttccgcttcatcaccgcttcccccgtacttctgcaggtactcctgcgcctgcgccaccagcgtctcgtgctgccccagatttgccaggcacttcaaataacgaaaatgcatccgctccttgttcaactcctgcgaatccaatcgcaataatcgcgcataaaactccgaggcttcagcatactgcccgcgcccaaaataagtctcggcaatttccgtctgcgccaacaacaccagccgctggtaatattcaaattgatcgagccgcaacgacaacgcactcgacagcaccgcgtaaaatttactcaaggccagcgctcccacacccatctcccgatagagaataccctgccgcaacaatatctccggcaccgccgggtcatcgtggtaacgcttgacgtactgggagaaaatctgctgcgcgcgccccagttgtccctcctgttgggccaccagcgccaactcaaacaaggctggccgtttcaactcctccggcgcgtcggactccaaaatcccaatcaaaacagccgccgcctgccggtgatcccgcatcttccgcaattcccgccccgcctccaactgctcctgaaactggcgcacccgaaagacatggttggaagtctgcaacttcaccgtcagcaaattgctgcttgttatctgcccgggtgccggtgggttggtcaatgttccagctccccagcccggcggcccagctttgatcagccgcttgacataatcatcaatcaaaccggctgccgggctgttggtgacgacttttaagttttcattcgtgccggccaccgacgaaggaggggccgaagtcgtcactgccgtcggcgcattggatgcctgcgagcctgagccccataaatgagcattcacccccgccatcccaaacaccgcagccaaaatccacccccaccatcgcaaacgatggcctgaaaaatagccccccctgatgtctgataaatccctcatggcgaagacggctttttaggttcaggggtttcgtaacgggccgagctgggcggaatgcgtgcaggttgcggtggctgaaacaatggcaaggtgacaattacccccgccgcattggtacttcccaccggcacaggtgttttgaaatattgcaccaacatctgcggagtgatttccggctccgaggaagactgcaccgctgaagccgccggcaacgtcacttgattggtggccacctccaccgaagcggccggcggctctgaaatcaccggcacttcattcgtggcaggcggcgccaccaccacaacattggttggcggaaccggcggcggcactggattcggcggaatgatttcggccgcggcccccgggccgcccaccgtgccgggaatagccgcctccgccgcagccaccggtgccgccttggacgcacgagcaggccgctcaaaccgcaatggtcccggccccaaatacggcaaataagccgctggcgccggccatatcgcagccacactcacggccactatgacccagcttcgtaacacaaaatcgcccagttcgttggctcttttccaagctccctcgcccctgcaaggcaggaagcccagtatctcggagaaattatcggcaggattcggtgaaaactttaatccaatttcactcctccaaaatttcccgccttcgagagaaagttttccctaatttttccatttttggcgtccaagttccatgcagaagtgcctgcacccgttaaggttgcaaccagccatattctcacctgacatcccgcccgcaaaaagctacactgcccgcacgatgcaaaccttggacaccttgggcattattgccggcaaccggaaccttcccctcacgttggcgcgggaagcacgggccgccggcatccggcggctggtggcagttgcctttgaaggtgagaccgaccccgccctcgcccaactggtggacgaaattgagtggctccgggttgggcaactgggacgaatggtcgacgcatttaccaagcgcggtgtccgccactgcgtcatggtgggccagattgccccccgcaacctcttcgatttacgccctgactggcgggccgcaaaactgctcctgcagctcaaagagcgcaacgcccacaccctcttcggtgccatcgccgatgaattggcccgcgagggtgtcaccctcatcgaggccaccccttggctccaatccctcatgcccgaccaaaatttccatgccggcccgcgcctgagcgacaatcaaaaagccgacatcgccttcggccatcggatggcgcaggaaatcgcccgcctcgacattggccaaacagtcgtcgtcaaaaatggcaccgtcctggcagtcgaaggctttgaaggcacagacgcctgcctggccagaggcggggatttggcgggcaaggacggtggggccgttgccgttaaagtggccaaggccaaccatgacttccgtttcgacatcccatgcgccggccccaaaacagtggaagtctgtgcccaacacggagtggccgtgctggcagtcgaagccggccgctccctcctgttggaccggactgaaatggaagccctggcaaaacagcgcaaggtgaccctcgtcgccgtgccacccacgccggccacaacataaactacggcgtaagcgccgtcttaaatcgaagtcgaggtctccaggaagccttgcaactgccgcaaccgtgtcggatgccgcatcttgcgcaacgctttggcctcaatttgccggatgcgctcgcgggtgaccttgaactgcttgcccacctcttccaacgtccgcgaataaccgtccaccaatccaaagcgcagctccaagaccttccgctcccgctccgtcaggctggccagcacgtcgttgaccttttccttcaacaaactgtaactggtcatgtccgatgggttctccgccgttttgtcctcgatgaaatccccaaaattggtgtcgtcactgtcccccaccggcgattgcagagagatgggttgctgggccatcttgagcaccgcacgcacccgctccaccggcatctgcatttcatcggcaatttcctccggcgtcggctcccgcccaaaatcctgcaccaactgcttctgcacccgcatcaatttattgatggtctcaatcatgtgcaccggaatgcgaatggtgcgcgcctgatcggcaatgctgcgggtgatcgcctgccgaatccaccacgtcgcatacgtgctgaacttgtaaccccggcgatactcgaatttctccaccgccttcatcaagcccatgttcccctcctgaatcaaatccaggaaggacaacccacggttggtgtactttttagcgatggatatgaccaagcgcaggttggcttccaccatctccgtcttggcctgcatcgccttgcgattgaaatgctgcaattgcttgaacgcctccaggtattcctcacaactcatccgcaccatctcctcaagcgcctgtttcttccggatttccgcctgaagaatggactgtatctgcggattcttcttttgagcctcaagctcctgaatcgtgcgcaaacacgtctggaatttgtccaccacgttttccgccacattggcgatttcctcgatcaccttctgcttgtaataaaacttgggaaaagtcgcctgaagcttcgcatcgagcttcttgaattccttcatcaacttttccttcttggcgggcgaggtcgcagccaccatttcccggtacttgtcatccacctcccgatccatcgccatcaccgttttaaccagccgccgtaaatccttgaggtgattttcccgtccctcaatctttttgtccacaatcacccggtcaaaccgttccttgggcggctcgctgatgagtttctccgccaaagccacgtgctccttggccgtaaagccaaagctgtacacgatccgcttgacctcgttttcagcgtcttcgattcgcttggatatttccacctcctgctcccgcgtcagcagcggcacctggcccatctgcttgaggtacatccgcaccgggtcatccaaaatgtccagccggtttttatcgtcgtcttcctccggctccggctgctttacccggtccacctccgcctgatctacaatctccacctcaagattccgaagcttggtgtagatgtcatccagctcctccggtgtcaccaccgaatcaggcagagcgtcattgatatcattataagtcaggtatccctgctcctgcgccaatcgcaccaattccttgaccttttccgccaggtcaatcgtctgcggttgcttgttgggatcctggttttcatccaccgcaacaggcgcagcttcctccatcgccgtcttcgcaatggattttgccgttttcacctcgcttttagccgcggccttggcaacagcctcgccgcctttcttcgtttgcaactgctctgcctttttgctctcagccgtttctttaaccttcaaagagccgggctttttatccttgttttccacttcggcaggcttgaaatccttcttcttcggtgggacgccatctttcggcttggcctgggcagaagcagacgctgccggtttggagcccttggcctgggaaggttgggcgtgggccttcacttccttattggacgataactttcccttgccagccttcgcggctggctttttcacctgaggttttgccatagatgcgttttagaactatcggctacaaattctcgttataataaatagccttatactttaacgcttttctgttgtgtagtcaatctttgcttcaaaatcaaactttgcccacccttgctgccctgttgaaggcgtaaggtaccacgtaaaaaacactacatttccacaaaacacgggcctgtcttccccccctcccctcgatatttccacccggttataatccatttgtaaccttttccgccaaaaatgctcttggtatagtgtttggaacgtaggcggccaaccaactgcatccgccgcctaaacgccactcatatctgtgggcatgaccgaaacggtccataccgaagtgttgccgctccattcgacggcggatttcaccgccgcagtggagaaagccgccgctttgcttcaggctggcgaagttgtagcggtccccaccgagacggtgtacggcctggcagctaatgccctcaacccacaagccgtagccgccatctacacagtcaagggccggccttcccgcaatcccatcatcgttcacgtggccgatgaaagcatggcccgccaatgtgtcgcctcctggcctcccgctgctgccgccttgtcccgtgccttctggcccggacctctgaccatcgtcctgcccaaggcagccatcatccccgacatagtaactgccgggggccccaccgttggcgtccgctggccgcaccatcctttcatgcaagctttgattcaacgttgcgcctttccactcgctgcccccagcgccaacctttccaatcgcgtttctcccaccaccgccacccatgtgcgccaacacttggaaggacgcatcccccttatcgtggacggcggcccctgccccgtcggaattgaatccaccgtggtggcccttaaaggtgatgtttggcgcatcctccggcccggcatcattcacaaggacgctctggccgccgtcttgggcaccggctctgctcatgaggccgcctcacacgatagcaaccgccctgctttggaaagccccggccttctgccgcgccactacgcccctcgcgcacaagtgttggtttgggcctgggaaaacgaagactccctgcttgcgcagattcgccgcatgggggcaaaaccggaggaaacttacgtcttggcgcactcctgtgcgccccgccaaaaggactggcttgaagtcagcgttgcaccgcgtgacccggaagcctatgcacgcgccctttacgcggaattgcaccgggcggatgctcacaatgcacggtggctggtggtggaacagctccccaccgatggcccatggcaggccatccatgaccgcctccgccgcgccgctcaacatgaagaaacttgaattttacgtcggttgttgattgccatgcctcaaccgcgttacgatgaattgacgttttgatgaaaaacttgcaagctcgaccaatgacacgactgggaatcatcgcaagcctggtggccgtcctcggcgccacggcctggggtcagaccaaccatctgacggaacgcgccatttctttggatgaatgtctggaaatggcattggaaaacaatttcacccttcgcattgagcgccacaacatcgagcaagcccgcttcgacctcaggcgctctcaaacagcctacgacccgcagcttttctttggcctcacccgggccagaaacaccggcctcaaccaaaacttcgatttattgggcaatcgctccgagaactcctcccaaaacacggtggacaccctcgaatacggagtcagcgggctggggcccatggggtttgaatactcggtgccagtgagattcacccgcagcttcggcgacggctacacgtacaacaccctcgatctcaacaccttcaccttcgtgccggtgggttacgacgagtacgctgcccgcttcaacatcgaaatgcgtcagccgttgctccgcaacttcgctgtggacaacgtccgccgcaccatccaggtcaaccgcaaactgctcaaaatgtccgagcaccagtacgaagcccgcctgatggaaatcatcaccttggtggaactggcatactatgaactgatcttcgcccgcgaaaacgtcaaagtccaggagaaggccctggaactggccgaaaaactcctcgataacaaccgcaagagtttcaatgtcggaagcatggccattctggaagtgcaccgcgccgaatctttggtcgccagcacccgcgccgacctcctggccgcccagcaattggtcaaagtgcaggaaaacgtgctgaaaaacctcatcaccaaagacctggccgagtggaaacaagtttccttgagacccaccgaatccctgatggccattccgcaagccctcgacgtgcgcgaaagctggcgcaccggtttgaccaaacgccccgacctcgcccagttgcgggtggacttggaacgccaggacattgacatccgttacttcaaaaaccagaccctccccaacctgaacctcgtcggttcttacggacgggatgccctcggaacgggctttgaaaacacttggtcagacctccatttccgcgacaaagccgtggactactattacggcgttgaactcagcttcccatggggccgtcgcgaggccaaataccgtctggcgcaggaaaaagaccagcgcctgcaaaaggaattagtcctccaaaaactccagcaggacatcctggtccaaattgacgatgccatcgaagccgttaaaaccagttatgaccgcatcgccgccacacgccaagccgctgattttgcccaaaaagtcctccaatccgaggaatccctcatgcgcgtcggcatgagcacctccttccaaatcctgcaataccagcgcgacctcaccgcagcccgcacccaggaagcccgcgccatcgcggattacaacaaggcattggctcgcctagcccaggcggaaggctccaccttggaacggcgcaaaatcaaattacaattcaaataaaaccgccccggaaacgcgaaggttaaaagcctctcttgcagtggctgctgctacctgctgccaattcgaaaccaaaagcactgcgggaaaacttcccgcaattacaccagcccctccaaaatcatcggcaaccgctccaagctgcggttaagccctgcccgcgcaatggccttggcactgtcggtttggttggggaacaacaaatgccatgccggcgtttcaaaccacgcttccgccgccacgctctggtaattcccgctggtcccgatttgggcatgccgcaacagcagatccgccacatgcaccgccgccacaatttgaatatgctggctggcgcgctcgggcgcatggtgaaaccgggccgactccaccatcacctgcggcagtcggtgttgctccaaatacaacccgcccaactccgcgtgatccatccccagcacctcaatttcaatcgcctgcaacggcgcttttgtctcggatgaacgccggtgaatctcggcaaaatgctgcggaaacaccgcggccatcacaattttgcccacatcgtgcaccaatcccgccacgtaatccgcctcgtcattgggcattcgcaccgccgacaacacttcccgcgccataatcgccgtgccaatgcaatgacgccaaaactcccgccatggaaattccgtgttgcccgccatcttctgaaaatcctcgatcaccggcgtcaccatcgccagttgccgtatttgcctcagccccagataaaaaaccgcctcctcaatgctgttgaccggcacattcagcccaaaataaaccgagttcaccaaccgcaacaaccgcgccgtcaaactagggtcccgccgaatcacctcgctgatttgcgccgtataactctgatcagccgccaacaactcccgcagcgcactgttgacagtgctcagcgatggcagacgcgggcaggaatgtaaccgcgccgtgatctgttgccggttcagcggcgtcagccggttcgtagtggccacttgactcatactcatcttccctatcggcagtcagaggaaccaactttaataaataataaaaaaagacctctggttaccctcccagcgtccgatttttagacctccacaatcaaacagccttgggtagatacacagaagccgcgcttgacggcctgccctgctttggttaccaaagcatcaccaatacagcacaatacattcgcgggccgggccggtttggcgtccctccccgccttggaaaatcacatgaatactgagaaaaaaggcctgtttgtcaccgccgacggcagaaacgtcgccttcacctttgcgctggtcagctcgttgtttctcctctggggattctgcaacgggatgattgacgtgatggacaaacatttccaaaacgagctcaaactcaccctcagccaatccgcctgggtccagtttgcccattacctcggctatttcatcatggccctgccggccggctggctggccatccggctcggttacaaaggcggcattatcgcaggcctcttgatggtggccgtagggggattgtggttcatcccggccacacacatcgccaagttctgggcctttttacttggcgtctgcaccatcgccgccggtctgaccttcctcgaaacggtggccaacccatataccaccgtcctcggcgacaaacgcttcgcagccactcgcatcaacctggctcagtcctgcaacggcgtcggctggatccttggccccatcgccggcggcctcttcttttacggtaccgatgaaacaggacgcagcaccggtgccgaaaccttgtggatcccttatgccggtgtggccgtggtggtcatcctcctggcggtgattttctttttcgcccccatgcccgacatcaataccgaggacgactatcacctcgacgataaaaacaatgacaaaaccaccgccattaaaccggcttcccgtgggctgacctacgggttgttactcgtgaatatcgccatcctgcttttggtgtttggaatgataacatggctcattctcagcgcgaccaaagttggcgaatccctcaaaggcctggccgctgccctgccgcatccttcctccttcaccatcaacgcagaccacgccttgaccgtcgtcctgttttgggcgggcgtcgccatcatgatcgtagcggccattgtcatggcccccatgaccaaaaaaatctcccaccacagcatctggtcccacccccatttctccggggccgtggcggcgcagtttctatacgtggccgcccaggcgggcatcttcagcttccttatcaattacgtgacctcagaagtcccggacctccccgcctcgtggcaccgcgacagcaccaaaaaatggattgaaatcaacacctccttcacacgcgatgacctcaaggatttgcctgcgctggcggctcgattgaaaaaccccaccgaccccgtgacagccatggtggccggcaaattgtcctccgacactcaggcagccctcgcagagtacgtccccgacaaaaccaaccccaaattgctcagtgtgcccttggtgcaggatttgaaaagcattgtccgcggcaccaacatctacaatccccagctcttcgctggtgtcaacctcagccccgccacccgcgaaatcctggccctccctgaaaaagaacgaaacacacccctcctcaaccgcctgctccttacagacgcctttgccggtttacttaattataccccaggccgttattgcatcagtgacgccggcgcttccaacctcgcctctttcggattcttctgcttcttggtgggccgcttcaccggagcctggctgctgaaacgtttctccgcccaccgcatgttgggcctctacggcctcatgaacgtgctggtctgcctgctggtgttcttcaagctcggctggctgtccgtggtgtgcgtcttcctcagctatttcttcatgtccatcatgttccccaccatctttgcactggggattttcggcttgggcgtccgtgccaagcgcgcctcggcttacatcgtcatggccatcatgggcggtgccatcctgcccaaactcatggggtacgttgctgaccaaaccaacatgtcccgcggtttcatcgtgccgatgatttgcttcgtggccattgccctttacggcttcggttggagccgcctcagccaggccgaatccttaagcggcctgaaaaccaccgccggccactaaaaacaaggctcccattcttgcaccacccccctgcgctggggccggggctcgtcttgtcttcaaccaatccgcgctcacactttctccggcaccacaaacggcggacggtactcgcgccgaagcagccgatccgcctccggattgttcacaaacttttccttgtcggcatcaaacatcaacttgggccccacccacaacgtcgccttctgcgggtccacaccaatcgccttggtgttttccaaagtcgtcatgatgctctcgcccaccacctcgttatcgctgaaatccttcggcttctcaaacggtcgctccttggccaaccggtaggatatattgcccaaatgacagcacgcgctcgaaaggtgcccctccaaaatgtctgcgtgcagattttcccgcttgcggctgcgcacgcactcgatgaaattggcgaaaatattacccgagcgcgacggcgcatccaccttggccaacggctccccttcggttttgtctttggggaaaaacttcccatccttcaccacaccggcctcaaagaaatattcattggcaactttgttgggatactccttgagcttgcccacaagcccccgcgtctcaaacaacagcaatgtcccaccaaaatcgagcaccgtcaccatctgattcggcgtctgcccttggtccttgtgatccggcccctcaacgtaccgcccgcccaaactgatgaccgatcgcggcaacgtcccaccaatcacccaccgcgccacatccatctcatgcacaccctggttgccaatgtccccgttgccgaagtcccaaaaccaatgccagttgtaatgcaccaaattccggtgaaacggctgtttgggcgcaggccccagccagatatcaaaatccaaattggctggcggttcctccacaggcttgaaaccaatgctccatcgtggcttgcaacaatatcctttggccaccaacaacttcccgtaaacaccgcttttggccaacgccaccatccgcacgtccccaccggcgcgccgctgcgtcccgtgctgcacaatccgattgtacttccgggccgcctccacacatttgcgcccctcaaacacattgtgactgcacggcttctccacatacacatccttgcccgcctgacaggcccaaatcgtggccagcgaatgccaatgattcgtcgtggcaatggagactacgtcgatttccttgttctccaacatcttgcggatgtcctgataagtctgcaccccctgcaacttgctcgcacgtccctccaacaccttcaaatccacatcgcacaacgccgtcactctgactcccggcaatttctgaaactcgctgatatgattggccccacgcccgtttattcccaccaccgccacacgtatggcctcattggcacccacggattgcgcatacacacgcggcgccagccagatgccggcggcccccaaagttgcggttttcaaaaaagcacgacgcttcaacgacgaagactgcatgtaggctttcatgcccccactctaatctctccgcgccccgcttcaatcccaaactccaactcccaccaaacaccgactaattatagatgaatggcagtgcaggtcttcccaacataagatgagcttgcgcttgcccttccacgccgcggccttacattgagcgtgtgcatgatgcttcggatgattggcgccggcgttttgaacgcctgcaacagttataccacgtcagccaggtgctccattccactctcgaacctcagcgagccctggaactgattgtggaacaagccgtgcagctcaccggcgccaccagtggttcgctggttctcctgaatcctcataccggttttttggaaattgaagcctctcacggccttccacccgaggctcaaaaactcaagctccgcgccggcgaaggcatcaccggctgggtcgtccgcaccggccagccggcactcgtcggcgatgtccgcaaagacccccgctacatcatggcacggcccggcgtccgctccgaattggccgtccccctccaagtcggcgaagaaattcgcggcctcttgaatgtggactccgacaaacttaacgccttcaccgccgaagaccaatccctgctggaagaactctccgctcaagccgctctggtcatccgccaaacctggcaatacgaacaacaccggttgaaagcccggctgtttgaaagcctcgtcgccgtcagccaaatcatcaattccaccgtcaatctggacgaagccctcgccgccatcacccaacaggcctgccaactcatgcaggcacgcctcagctccttgctcctgctcgatgactccggacgctggctggacctccgcgctgcgcacggcgccggccccgactatatcaacaaaccgcgcctggcagtcgaggacagcctggtgggctccgttgtgcgccgccgcaaagtgcttcaggttgagaacgtccaaatctcccagcgctatcaacacgtcgaagtcgccgcccgcgagggtctggtctcgctgctcagcgcacccctcttgtttgaccaacgttgcatcggcgtcctcaacgtctacaccggccggccccacgtcttttccaacgaggaaatccgcatcctcaacgccctggcgggtttatcggccgtcgccatcgaaaaagcccgcctctacgaacgggtggtggacctcgaagaagccctccgccaagctgaaaaattcagcgcactcggcctcttggccggcgaagtcgcccacgaaatccgcaaccctctcaccgtcatgaaaatgctgtttcattccctgaacctgcactttcctctgatagacccgcgcaataccgacgtgcgcatcatcgccgacaaaatggaacaattggaccgcaccgtcgaacgcgtcctcagcttcgcccgcacagccgagccccagtttggccccgtgcacctccaacacgtgctcggcgagctggaactgctggtccgccacaaattgcgccagcaaaacatcctttggaaactcagcctcgaacccgccctccccgccgtttggggcgatgccacccaactggggcaagctctcctgaatcttgtgctcaatgccgtccaagccatgccccaaggcggagaattacgcatctccgcccgccgcctgccgcgcgaccccacccgccccgccacccatgtagtcttggaagtagccgacacaggcgaaggcatgagccccgaacaatgccgccgcgcctttacccccctcctcagcaccacccgcaccaagggcaccggccttggactggtcttggtgggccgcatcattgaagctcaccacggacgcatccaagtcacctcccgccccaaggcaggcacacgcttccgcatcacgctccccgttgaaaaccaaaatcctgcgtaattccccccaatcgcctccggcggcccccttgacatcaagttgaacgtgggacaagttgccattgttgtattatgaattttgcgtggcttagcctggaccttgttttgattgtgctgtttgccttttcgctaccggcacttttcctatatgtcatccgccggtggctccaaaacagcgaatcggcaaacccatcggtggacaaccaaacaccggacccaggcaaccattcatctcactgaatgaccaacggattttttctcgccttcttcgcggcttcctcaaaacaggctttctaatatgcttaagccctaaggaggctcaagccatagggttgtatgccgctcactctttgctcgggaaaaaacagctccaccgattatttcaccattagatctcccttgggcactgaaaaactttttcgctctatttttgctgtaaccgccttttttgatttgttctgaccccgcggctgggcttatcttgaagcagtatagcgatggaccctgcccactcaacgtccagccgcaaccatcgggccacgccacacgcgtggaggaggtgttcatgttgacctttgaccccacgcgattgcaagcggccttgcggttggctgcttccgagctggtcaaagctcgtccggcaggttctccctggcagggtgaaatttccagcagccccacagccaccgctgccgccatctgcgccctcagcctggcggataccgagtggaaaagcgccgaggacaccctgcgccggctcgcgttacatggggcggagtggttgagccaccacgccaacggcgacggcggatggggcgacaccccgcgcagcttcagcaacctcggcgcaactgccctcgcttgggcggccttcgggctggcaccgggaggcgaagcagcctttcaggaacccgcccgtgccgcagagcgctggatatgccaaaaagcgggcaataccgcccccgccatcttggcccccatgattcgcacccgcttccgcggggatttggcgctggccggtggcgttttgatgtgctgcgcactggcgggacgactcggcagtgacattcgcgcctggcgccacgtcccctccctgccttttgagcgtggagcactccctcccgaatggtgggcgtcagtccaaccgcccgctgccagttgggccatgcccctcctcctcgccacaggccaggctcgccatcacaatctcgcaggcggctgtttcgtggtccgactgctgcgcgaattctttcgcaataccactctgcgccgcctcacggccttgcaagcagaggacgggaattttcaaacctcccccctcttaactgccctgaccaccatcggcttgctcgccgccggctacggtcgccatccagccacagaaaaaggcatccgcttcctggtaacctccgcacgtcccgacggcagttggccgctgattacaagccaggacgtccgccttaccgcgcaagccacgcaagcctgcaccaaccccgtccccgggcagccgtggctgccgggcctcgacgaacttcatgccttgcgccattggcttctcgcccatccgcaacacgatgacccggagggactccgcctcccagccatcggttggtcggccagctcacaccccggcgcgtggcccgacaccgtttccaccgcagaagccctcttggccttgcgctcgctcggtgacccgggccctgaggtcattcaagccgtcctcggcggcgtcaattggttgctgttgacccaaaaccgcgatggcgggctgcccccttatcgtcgcggctggtgccacccggaacaagaaggcagttgcgccgaggaaaccgcgctgaccttgcgggcttggctggcctggttgcacgtccttcccccggaccaacaacaccgtgttcaaacctccatccaccacgccatccgttttctcatggacgagcaacgtcaagatggcgcctggcgttcacactggtttggcaatcaatacgcgcatcaggaggaaaacctcaccatgggcaccgccggagtcctcatggccctgcccgaactggtggcccgctcctatttcgagttggtcgaaccactcaacagcgccgtcctctggctcgtcaaaaaccaaaacagcgacggcagttggggcggtggccacggcggccctccctcagtcgaagaaactgctctggcactcgaagccctggccgaaacactcctccaacctggccccctcttgctggaaactcgtgaacaagcacgcaacgccgccgcctggggcgccaactggctagtccaacatatcgaagccggcaattggaccacacctgcccctctgggcttgctctggggacaattctggttctacgaaaacctctggccggccctcggcgtcacccgcgccctggcccgtttgacacgcctggtttaatcccgccaccccccggcgttgtcatccgcggcaggcggctcatgtgccgaaaaaccatccgcgacaatggcttcttcggcgaataatgcaccatcatgtcctgcatccgcatcaacacccacggctcccgcggcgcataaccgtttttggtgaacacaatgtcatcagccacgtacacacacatgtgcacagtccggacgtcctgccccatcggctcatacaacaggatgagatccccaaacaaatccgccttgggcacaatccgatactcgctccgcaacacctgctcctgaaatcgtgcatcaatgaaccggtcctccaccttgtcccggtgaaaattatacgacgaccaaaaacaatccggccacctccccgcaataatatttgtgggatgcggatacgaataaagcaacagccgcggcaccggcggaaaaaaccatgccacattcacactccccccctgcggcaggcgcttcaatgactccaacaacggccgcacctgaagcattcggttgggcagcccccaatagcccatcagccgctccacatcgctggtgggagtcacccgcaaattcaccataagcgtcggcactcgtgccaccgtccggctggcttgcagataatcctctctcgttaacagttttggcaggacatgccggtccgcaaaacacagcaaaccatctttccggtacatcatccgctccatgagcttcagcgcatcttcagacaaactgcattgcgaaaaccattcggaaaactcagcattaaccgcaaacggataacaataagccacattttgttcatcctcggccaaaatggagtagatcttggcccgcggctccggcggcatgtcccgcagcacttcaactgtcggctccacataaactcctcctgtcgtcgcctgccaacggttcgtgtccaacaagctcgcctccaacaaactcggcaacccgcaactttttatgaaatccctcaaagtctccggcttataaccggcaaaaaaccacctgttcgaggaagggggaggcggatcgtacgcaaaatattccactggccgctccaaccaaattgggatgatttccaatattccccagcggtttgttgaggcttcatccttcgccaccaaaccgttgttggatgagcttcgatcagagcgcgaccataaagtgcgaccaataaattgcgcacccaacgtaatcaatacccctgcaagaaccagccataaacttgggagaaattgccggcgaggcacggccccattctgccgctcgctccgtgatgaagtcttggctgggcgcattttcataaacagcctcccttaccactcaaacagcgcccaaagaccagccggcccaaaaacacccctctcccgtcgaagtgtttgcctgttattcgccggatgtattaatcgcccgcccttaaggacgttattcccttgcagccatcccattcaaataaagagacgggacattacctgcgaaaggttacaaggacaacggttttgtgaaaaaaattagcctgaaaaccctcacattgtgaacttacctaccagacggtaagttccgccagggacgcaaagggttgacggtcaaatccgctcacagcctccagcttcaaataacggacctgtaccggtgccggaaacgtcaattcctttggattggcatcggcggacaatgtgccccgcatcaaaggtgttccccagttttgtccgtcgctgctcgtgtaaatggcaaactcgcgtatccacccatttttattgttgtcctgcctcggcgtcagagtcacaccacgcagagtggccgattgttgaaactccaaaaccagccaatgcggaaaagccggagcttcctccccccatggcgtgtgccaaagcgtttgcacgtccccatccacgaccaacttgcccggatgctgcggatgttcactgctcacccgcgatacccggacccccagtttttccatcaaggaaggcggcctcaacaacttttgcacatccgccggcgtccaccgatgcgcgggtttgaaacgtggaccgctcatgtaattcaaaagactgcgccgaagctgccttgccaccggacgctgctccaagtctgtattcaaatccatcgcacacgccaacaaacgcccccgtcccacttgcgcctcgatgattaaccccagtttgcgcgacgtaaaccaatcgtctatcgcatacaccaacggccggaatgtcgcctccgtgcccgtcaacacaaacggatgcgcccgcgacaccaactcccaccattgccagttggaatgatattcagtcggaaaatccgccagcgccggatgcctcggatcgcaataaatgcccaaagtatgcggcgcctgacgccgcgtccacgctgtgttccaaaagatgctcgaaaaaccaatttgcacccgccccaacgcatccccgcgaatggccgatggcggcggattcaacaacaccttgcctccgcgctccaaaaccgccaaggccgccgaatccaaatcagtcgcccaatgaatatcctgcggcacactcacatccaccttggccggatacacccacacatcccaatcattcgcataaggcgtgccttccaccgccagctccaaattcaacttcgcaggcgcaggcatccccttcaatggcacctcaatctgccccaccggactgcagattccagtcggcaacggaccagtgaacatcgtccccgtcgccaactcacgcttcccctgccgcaaccgccagcgcaccacaccctgcggcaaatcctgcggtgcaaaccatcccaactccaccccggcctgcagcgtgtcctccgtggtgaaaatccgtctcggcaatcgcgcaatcggcaccaccggcccggcaaaccggtgatactccgcagccgtgatatagcccttgccatcccaaaacggatccaacacccccaccaacgccgtcccctgcccaggaaaatcatgcaaatccaacaactcgaatccccccatccccggcgtgcgtatcgccgactcaatatcctccttgtaacaaagcgcctgcaatttccccgacgccagcaaaaacgcccgcgccataggcgccaaaccgttctgcttcaaaaagtcctgaaaaatctcaaaattcttcggtttcagccagcccttgtatttcggcatctccgcaaagttgggaaacacacaccattgcccaatctcatgactcaccaccggcgccgcagcccgctggataaacgcccggtaatctgtcaccgtctcaggcggacgcgcattgatgcgtgaattcaatcccccgccccatgcctgaatgcgcggctccggtgtgatgtgaaaatcattttccggaatcatcggccaacccgccccgctggtgtaaagccgccgcgtatccaggcccttgcaataattgatgaaatcccccagccaccgattctgattctttcccgccggttcgttgccggctgaaaacatgataaacgacggatgattgcccaacacccgaaagatgcgcgctgcctcctcgtgcaaccacgcatccaccttgcgcccatcccccacactgctccccgaattcgcccaaacaccggcctccacatacaacaacatccccgtctcatccgccgcctgaaacgccgcctccgggggagtatgcgaatgaaatcgcaggtgattcaacccatgcgcctggcaaatccgcataatgcgcttccacgccgccacatccgtcggaggatagcccgtcaaagggaaaatgttgcactcaagagtgccacgcagaaaaagtttgcggccgttcaaagcaatttgcgtcccctgccgcttcacctcccgcaatccaaacgacacctcccgttgatgacgcaatacccgtccttcatccctcccctccaacgcagccgtcaattcatacaaaaccggcgaaaattcatcccacaacaacgcatcctcttccatctcatactcacactccaccaccccaccctccggagtccacgaaaccggcacagtcaccggcggcacccgatgctgccgtggtccattgtaacttcgcgccgtcaacgtcaacgtcccactgccggagcgccctgtgagattgcccaaccgcgccttgataaccgcacggcggcgagccacgtccggatacacctgcaaatcgtccaaccacacagggtccgtggccgttaattccaacacccccacaatcccattccagttgccttgcgtgtgatccgaaacactgtgcgcattgatccccacctccacatgaagccggttgtccacacgtaccgtcagccgatgccgcccaggcgtcaacgccgcagtacaatcatattcatgcggcgtccccaaactgttccgcgacccaatccggcgctcatccacccacacagtagtctcccaatgcggccgctccaaccgcaacaccacccttttgccctgccacgacgcgggaatctccacctcccgctgataccacgccacccccacataatgccgctccggttgcaaccaaaacggcaccttgatattgcccggttgccggtagggcgcataacgctcatccttgaaaaaggatcggtctatgatttggcctgtccactgcgtctccatggtcaccgggtccccaaatccctgctcctgcaatgaaccaggcaaccgcagccgctcctttaacacccggccatgccacccctcccccacaccggcatcctgccggtccagctcaaaccgccatgtccccgccaaattgatgcgctccgcagctcctgcgtaaaagttggccaatgcaaaaacaatgcatccaaaaaatccaactgccagcctttgggcgcccttgagattgaggtgttgggtcatcatgttgcaagggcagtattgcaaatgccgcactccagtttcaacacccaacaatcacccctctccaacggtggacaaaaccaaacaactcggaaatacttccaccatgaaacatacccttgcctgcatcgcactcctggcttggctggccacggccctgcccgccgccgaacgtttccccaacctcgcagccggtagcaacctcccccaaggccccggctttgcaagcaagttcaaagcagactccggcatcgccaaccatccctccgtcatcttttccgatgattttgaacagggcgatttaggggcacgctgggacgaaaaaggcgccggcaaaggcaaggccctaagcctcgtcccaccaaacgatacacgttgtggccgccgctgcatgaaagtcgaagcccgactcggcgaaaaccagggcgacggcctcaccaaatggttcaaccccgtggacaccgtgtacatccgcttctacgtcaaatttgaccccaactgcgactatgttcaccacttcgtcacacttcgcgccaaccgcggcctccgcggcgcagaccgctggagcggctttggcggcgcaggactcaaaccacgcggtgacgagcgcttttccacagccttggaaccttggggcaattgggccaagtggccgcccccgggcaaatggaacttctacagctattggcacgaaatggatgtctcccgtgatggcaaatattggggcaactccttccaagcagaaccccaggatgtcattcccaaagaccgctggatttgcgccgagttcatgctcaaacacaacacacccggcaaacccgacggcgaacaagccttttggattgatggacgcctcctcggacattggaaaggcatcaactggcgcaccaacccctccctccaagccaatgccctgaccttggaaagttacgtcaccgaccgctggacaaaaaaccccaccaacaccgtctatttcgacaacctcgtcatcgcccgcgaatacatcgggccggccaccgccccctaaatgggcagcgtgggctgcggatttgccgtccctttgtccggcactgcggctgccgcagcttgcgcagcgccattctcaacctgcaccaacgccggccgcaacaccttgccctgatacgtatatcccggcgccagcgtcaaaaggatgcgcgtgcccgcagccggtggctccgcacactgatgggcctgatgcatctgcggatcaaacccctcgcccgcctccggagaaaacgcttgcagccccacccgccgcgccaaatcacgacaaacattttggaacaacccgatttgctccaccaaatgcggctgcccgctctgccgcgccgccatgtacaacgcaaacacctggtccagcagacgcaacgtcaactgcagccaatcctgctcctgccgccgcaacttgtccgcttccaaccgcaacgtcgccttctcggtatcattggcctgccgcagaaaatccgtgaatgccttggcctcagccgccatcccgtcggccacttccttcgccgtttgcaccgtccgcgcacattcgccctggatgttcatccacgcgcccgtagcctcggctatctgctgcttgatggcctccaaattttgaatctgcgccactgtcgaacgcaacgcatccgcctccgccagcttcatctcagcccggtgctggagaataaacggcgtcaccaacaaccacgccccggcagccaccgccgccgtgcacagcgccatattcgccgtgctcaacggccactcgctttggtacacaatgccaccggccaccgctaataaaagcaggtcgcccaataaaaacggcaacaccgacggtctgggagtcgcaacgtcactcatgcgcccgccagcttatgtccttaggcacaacccatgcaacagcgttttaccccacccacaacatcgccactccttttgtccaaatcaaagaacccccaccccaaagcaccccgcccctctcacaccccctgccccactccttttccccgcaaaatatggccattccttgccaaagccggtgtagcaaacaaccgccggtattcataagtttttcctgccatgctgagacaccagcctgtgcgtgttttatgaaaacagtccccttccccagaggaaggggcgaataaccggcataccgccacaaccaacgcacaggcccggaccccggctggccatgcaaatgagcggaagtcattccatgggcgcgcccacggccgcagccaacgtccccgaccttcaggggaacgggatcgaaggcttggcaagccccttgccggccatgtccagcgcctacgacttcctccaaaaccaatacgtttacgtcatcgtctccgcccgcgcccgcggattatccgttggcgtcaacctgaaccccgaacgccgctgcaacttcgattgcctctactgcgaagtcccacgccccatggccggtggaaacccgccggtcaacgtcgaagtcatggcccgcgaagtcgagcgcaccctcgcctacgtccaatccaaccgcctgcagcagcaccccgtcctcggcacgctcccacgcgaatttgtccaattccgccaccttgccctcagcgggttgggagaacccaccctgtgccccaactttgtcgaagtcgtccaaacactcgtccacctccgcgctttagggcggctgccctacttccacctcgtcctcgtcaccaacggcagccagctcgaccaccccagcgtccaggctggccttaaatactttaccgccaccgacgaaatctggatcaaactcgacgccggcacacccgagtacttcctcaaaatcaaccgcacacccgtcccctacgaaaaaatcctcaacaacatactcctcgtaggccgacagcggcccgtcgtcattcaaagcctcttcgtctccgtggaaggcgaggaaccgcccgcccgccaaattgagcagtacgccatgcgcctcaaacaactcaaacaagacggcgcccaaatttccctcgtccaagtctattccgccacacgccccacccaccaacccgcctgcagccacctccccttgaaatccctcagccgcatcgcccaaatcgtccgctgcaccaccgaactccccgtagaagtcttctaacccccccgacctccgtcccacttgacagcccgtggcaaactcctacgttgccaaccatgcatcgcccttccgcttcatcctttggcatcgggcttattctggggttgctcctgaatgccccggcacccaccttcgccgcgttggatactcgcgagctgcacacagaagtcaaaatcaccattcaactgaaatacctcatctggctgccggaaggttatgccttgccccaaaaccgctctactcaatacccctgcatccttttccttcatggtgcagaaaaacgcggcacaaacataaacgctttgcaggaccttggaccgctgaaatatgcgcgcacacatcctcaagccttcccttttatagtagtagcccctttgtgtcccccgggacgccaatgggagccgttggcgttactgacattgttggatgaaatccagcgccagtatcgcatcaaccaacacgccatttacctcacaggctacagcatgggcggtgccggcacttgggccactgccatggcggctccagaccgctttgccgccatcgcgccattgtgcggcagggtcattccactgcttgcaggcaacttgtaccgcacgcccgtctgggtctttcatggtgaaaaagaccaggtcgtgcccctgaaccactccaccgaaatggtggacatccttaagaatcgcaataacccccacgttaaattttcactgctgccgggaaaagaccatgaaatatggcacgatatttacgataactccgccctctactcctggttcatggaacaccgccgcccctgacttgagtacaaccccacgccgcgatccatctaggtgaggcaaaaaacaattccccgcgcaacaacacctttgcctccggagacacgccttcacaatccccgctgctccttcctctgcccataccggccaccatgccgaaaagcaaaattcgccccccttataaattttccatttttcttttgacaaccaaacttttcggcctagagtgacctcatagcttggcaaaccacgtggattaacttcgaggtttcccaacatttaaaatttaaaaggcctgcttatgaacgactttaacctgatagaggagccgtggattcctgttatttaccacaatggcaactattgccgtgtcggcatcaagcaggctctttccgatgcccatctcatccgcgacatcgccacctccaaccccatggaccgcgcgggccttctacgctttctcctctctatagtttattggtgccatggaatgccagcccctcaagaaacgtctcggctaggtgatcctttaccggattgcacaccacatcttggtgcaaagacaaattttttctgccttttcgggcagaaacaccgtttttaccaatcaccaacggcaaaccgagaagtaaaaattggtgaactgtttcaagaaattccatccggaaacaatttctggcattttcgacatgtcaccgataaagaacatggatattgcccagcctgttgtgctctaggcctgctgcgccttcctcttttttcagtcagtggattgccagacttgaaatcggggattaatggaactccacccatctatgtctttcattatggcaaatctttagctcaaattctccgaaaaaactggttgccaatgaagcaaaacttgctgggcacgccatgttggatggaccccaccttggttccaccaatcggagaccctatcccgctgttaatcggattaaccgtcccagcacgcaaagtttggctcggacaacccattcaccatggccgttgctctttgtgcgggaacccatcaaaacacctggttttcgaggctcacattcaatccgccggtacgttggaaaattcaaattggcaagacccacatgttgtttatttcctaaaccaacaacaacgaaagtcatgcaaagctcccaatctcgtcgtaggcggtgaatttcaaatggaccgcccttatgccgatcttatggcatgtctcttggaacgggtccaatttcccgcaactgcgacaagccaacttctaattgtcggttttgccacggacaaagctaaaaatatagatgtttgggagagaactgtaactttggtccttaacgaaatgcagacaaccgcagccacagctttttccacctggtggcgaagtgtaagtgcattgtccaacaatgtttacactattattaaaacaaccccctacaatcggcctcgtgggtccaaaccctcgtatgttcactgccatttttcccacatcagaccccatgtggaacatataatatcatctaacatgcatattctagtaagtgaaccaaacgaaggttggcatgaagcacgccgtgagttcagcgcttttttgccgatgttggctcaatccctctctcccggcgtgacctcccaagccgttcaaaagcgccgtgccatcgctcaggccttgccacctaatccctgcccgaaaccggaaccatccagttcaccctccactcaaaaccccaacttgtaattatgagcgccacccttgaatacattacaaaactgtcccatataaaggccggctcccgcactttggttcgcactcatgccaatctctcattgaaccattccgtggatgcctttgatttgttcaccggtctttggtggcccttgcgccaacaatcacaatttgcaccccgtcgccgcgtggcctggctggtcgccaaacttcacgcagtcagtcctctgccacaccaaccaggccagaccctccccatccagctcgcgaagatttggcataggcagccagacaccaatacaaaaaacaggttccagcgcaaattcgatgatctcctttgccgtcccctggaccaaatggaacccgctttgcaatgggccttgagaacaattggctctgcaaatgagccatccttggactgggtgcaactcaccgacgacctctcccggtgggaacaaccgcaagttcgcgaaaaatgggccgaagtctttttaggcaggtaaactcaaaaccaaaaaagaaaggagcatactcatgaacaatcaaaataccacacgcatacaaatccatctgcttcaaaaccacgcaccggccaacttgaacagagacgatttgggagcaccaaaaacctgctacttgggcggcgtcctccgctcccgcatctccagccagtgcctcaaacgcagcatccgattgagcccctacttcaaagacctctgcggcggtgttcgcacacgccgcctcgcaaaactcatcactgaccaggttgatggcaacaatgcgacgaagaaaaaagtggccgccatcctgaagaaatgtggtttggaggccaaagagaacgacgaaacaaatatggtcgtttacaccacaaaagaagccatcagggaaatggcaacagccttgagaaacggactcgaagaacccgacattatcgccagattcaaagagcttttgagcacgaatactgctgtcccggacatggcactgtgtggacgcatgttggagacaggagaaatcaaggacaccaacgtcgaagccgccctgcaagccgcccacgccatttccacacacgaggctcgccccgaagtggattactatgtgacggcggatgacatccccggaactgatgccggcgctggttatgtggacgaagccatattcgtttccgcctgttattacaaatacttttccattgattgggcacaattgctccacaacctcaagggctacccgggcaacagaatccatctcgcagcccataccgtcggcgcctttatcaaggcagctgccttggtgactccatccggcaaacaaaacagctatgccgcccacaatccacccgatggtatcctcgtggaaatctcccccacacccatcaattatgccaatgcctttgccaaacccgtggacattggccaacgtgatttaatcggccaaagcattgctcaactcgcccagtacatccacgagatggatgccggtttcaaagtcgttgacccgtccaagcgcttctggttttcgccgggcatgcgcaatcgcttggagacctcacagcgcgccggtgatacagcaggcgaccgccaaaccatccgagtccaggcggtggaggttgatcaactcgaaaacctgatccatcaggtcatcaaggccattgacccgatcctcgactggcaggaagtccaaagaaccattctcaataaccatgaagcctgacacacttcttcttagactggaaggccccttgcaagcatgggggcattacgagtccaaatttgccatccgccgtgccgccgaggcccccaccaagtccggtgtcatcggccttctgctggcggccctcggcatcccgcgcacctccgctcctgatgattggttgggccggttaaactccctcctcatgggcgtgcgcgtggaccgtccaggtgtccgttggtgggactaccacacagtgggagctggccttaaaatgagaacagccgagggcaaaaacaaggatggccccctcctcacacgcagagaatttctctgcgatgcctcattcttggtagcccttaatggagagcccgcccttataaaagaactataccaagccctccaacaacccaaatggactctttacttgggacgcaagtgctgcccgccttcaaggccaatactggctcacgcccccggctgtcacaaagatctaccatcggcactacagtctgttccatgggaaaaacggtatgcagacgacaccacaccggaaaaacttgaagccctgctggagtggcgtccctccgaccaacaacccaatgcccccgatgacgccgaaatctggtatgatgccccccaatgcttggaacctcccgctcacggtccccgttttattacgagaactgccttctcagtcgctccagacggccaagtcaccgtggcgccccaacaccaacagcagcttcctttgccgcctccacgcccaagagcaaattacaacaactcagcataccaacgcgctcgtgataagcgtctgcacgccgatcatggcctgtgcgtgttttgcaaaaatcctgccaccaccgtccaacacatcacctaccgccgcgccggtggcaacgaaacaacagaagacctccgctccctctgccgcctttgtcatgatgccgtcaccatgatcgaatacggtttgggtttggagatgggccgcatcaacccggaagacccccaatggcgcgatgccatactcaagaaacgcaccgaaatcatccaattccgttcactcgaaaaccgcagacgttttttgcaaccagaggaggtttaaccatgtatttgagccacttattgattgatgtcggcaccaaccccgaccggccacgccccggccgactttggctgcgcaatatttaccatgtgcaccaacgcctgagcatggccttccccaccactcagcggaaaaccaacgacccccacttcttgaaaccctacaacccggccgattttcccctgcacaaccttggcaaccatgtttcccgcaacgaaaacaccggatttctcttccgcattgaccccgtgccggggggcaatcccctgatcatcgttcaatccagcctcaaacccaattgggactacgccttcaacaatgcggcattccttctggcagcccctccccaatgcagggacttcctgcccaatttcaacaaaggcgatcacctgcgcttccgcatcctcatcaaccttagcaaaaaagccaggacaagccatgacggcacccctctcaccaaagtcaaagaaaacatcctcgataaccaaaaccgccctaaatcccagtccaaacgtgtcgcgctgacatgggatgcaaaccaaaatccacaagatgtcatcattccttggttttcccgcaaggcatacgtcacatgccaaaaccaaacccaacccatccaggcatttcatctcaagcaatgtgaaatcctgcgcatgggttggattatcggatggaaaaaccaccatgcagccccggaaccgacctcacaaaaaatgaaattccgctctgcccttttggagggagtcttggaagtttcccatcctcaagccttcgccaaactagtagcctcaggcatcggctcggccaaagcattcggttttggtttgctctcgctctccccggtttcctccgctcaatgaaactggacgacctccatatcctccccaaattctccgatggttggagctacctctatgtcgagcattgtcgcgtcgaacgagaacaaaacgccatcgccatctatgacacagatggcatgatccccgtcccttgcgccaacctggctctcttgatgcttggcccgggcacctccatctcccatgcagccataacagttctggcggaccacggctgtttaatcatctggtgcggagaacaaggcgtccgcttctacgccaccggtatgggtgaaacccgcaatgccgcccgcctcctccatcaagccttcatgtggagccacgaaaacctccgtttcgaagtcgtccgccgtctctacgcaatgcgttttacagaaaccctgccatccaacctgtcattatctcaaatccgcggactcgaaggccgccgcgtccgcctggcctatgacaaagcggcccgtgccagcggcatcccctggaaaggccgccagtatgaccgccatcattggacccactccgaccccgtcaaccgtgccctttccaccgccaattcctgcctctacggcctctgtcactccgctattgtctcctcaggtttctcccccgccataggctttatccatactggcaaaatgctctccttcgtctatgatatcgccgacctctacaaaaccgaaatcacagtccccatagctttccaagcggccgcccaaggagacaccaacctcgaacgccgtgtccgcatctcatgccgtgacgcctttgccgaatctcacctcttggcccgtattatccctgacattcaaaaagctcttgcttggcaaccatcccaaaacgaaaactccccccttgattcagaccccgcccttccctctcacctttgggacccggatttaggggccgtgcaaggcggaatccaacaacctgccacatcccctttgcccccaactataccagccccagccccggaatctcatgatggtgctaatccttgaatcagtcccaccttcactgcgtggagaactcacccgctggctcttggaactcaaagcgggtgtcttcgtcggccgcgtctccgccctcgtccgtgagcgcctttggaataaatcctgccaccacgcccgcaatggcggctgcctcctcatctaccacaccaataacgaacaaggctttaacatcctctcctatggtaatacatccagaactatcgccaacttcgatggactcctcctcgtcaaaatcccaaaataaccccattttccaagggttttccccacgcacgtgggggtgaaccgcgtggtgcgaggtgaacaagaagatgccaagcgttttccccacgcacgtgggggtgaaccggccgtcacctgcccctcccgatccgtccccacgttttccccacgcacgtgggggtgaaccgcggcaggtggtgaagagttcggcgaagtttgcgtt

SEQ ID NO: 947 - DNA, 106471 bp, Artificial Sequence
  Synthetic Oligonucleotide
aacgccgcttcgaacagtgccggatagaacgacgcagccgccagtttcgcctccagcgccgtcagcgtcatccccatctcgtgcgggttctggatgacctgaaggtgttgggcctcgagcgactcggcccgctcgtcccagaaggcgaacgtgcgcggctcgccgggcgtgccgtagtaccgcgcgttggtcaggcccatcgcattgcgccgggttgctcgcccgcccagcccaacgctgaaccgccgcgaatccgcgaaaccccgatcctgctgatggcaggacgaacaggcaacggcgttgttcgccgacagccgctcgtcatagaacagcacgcggccgagcgtcgcgccggcgttggtgatcgggttgtccggcggcgtgttgtcgagggtcgacaacggggcgtaatgatccggcaacccggcggacgcgtacgccacataatcgaaccgcgcctccggcaacttcgggacacggtgccccggcgtccctcgcccgaatgccttctgaaacgccgcgaagtccaacaggtcgatatcgccgtcggcgtcgttgtcgaactcccccgactccggtcgcgcccgggctacacgaaaaccgaggtagtagtatgagaccctcggcggcccgaagtagtaggcgtacagcgcatgcagcccaaggaagttggccgagtggaacgacccgccgcgcacgccgcgaaagccgccgatcagcagcgtctcgttccattcccagacgttgccgccctgatcgaacgtcccgtacgggccgcgtgagggcttcccgccgtacgcgccgacctcggtcgtgtagtacaccggatcgacgtatccgccgaagtagtagttcgccgacccgtaggtcatgtccgaaccgggtggaagctcgggcgtaggccgttcgtgggactgggtcggatagctccagtattcgccgtggcccgcatagtacgcggccttgtaccattcgttctccgtcggcagaaagacacgggcgcggaacttgcgcaccacgccgtcctcctgcgacatgtcgtaggccccatcctcggtcgtggcggcgtcctgcgggccggtggcctcactgttgtgcatccagttggcaaaacgcaaggcgtcgaaccaactgacgtacgccgcggggcggcggccgcgattcggccgcacggtgtaggcgtagcttccgggcgagccgttgcgcacaatgccgccgatgtcgtgccagccctcggccatctcctcgttgtaaagggagttgggatcatcggcggcgacggcgttgagaaacgcggcgtactgggcgttggtgacttcgtacttggcgatctggaatacgtagtcgacctgcccgtgccccggttccccgaaccgcaggtcgggcgcgttccccgggtcgccgaccgtaacccattccatatcgacggcgaaagccgaaccggcgagtaccagcacaatccccgcagatctgacgagtgttgccacgaacttcgctctccggcgcccgttccaccgcggcgggtaggataaggaacaggataatcgcagcgccgccgacttgcaaggacctcccggccccatgaattgatcagcgccccgcgtgccgccgatgcggcaaaccgcgtgcccaccgcaccgcggacgacggtacggtccttgaccccgtcgggagggcgtgttacactggcgccgtcgtacgcgtacgttcgtaccgggtcgggaccagtattcgtgcagcctgtcgacgatccatcgcccaaggtcgcccgagcggatctgcggaccggtccgcgaaccggctccttgcgccgcgtggtcaccgacgtcctcttcgtcgcccgccgcgagaaaaaactctggctcagcccgttgatcctgatcgtgctgttgatcgcggcgctgctggcgatcgccacattggcgggcccggtggcgccgttcatctatcctttgctttagcgggcgcggcaacaaacgcccaacgctcacgccgggccccggatccgtccgcgccggatcgcggccgctgacgcgagaacgcgagaaacatcgtgggaacccgtcgagcggcgagactctatcgctggtggttgcgagtagcggccaggatacagaccgtcgtggtgaccatcctctttggggcgtgctacctcctcgtggttccgttgttttcactcatgctcgtgttacgcggtcggcttcgttcgcgccggggcgcggaacggagcgactggatcgacgtgcccgccgaggatacaaccgtggaatcgttccagcgaatgggatagcgattcgaggaccgcggcgttgaccgacgaagtaccagccgttgcatcaggtaagccgagccgccggccggcccggctgattgccgcgctggtgacactcatcggagtcggctttggcttccacacctccttcgatccgacgatcctcggcaagtacaacctccgatacttcatcgccctgtgctgctggttcgggatcctcacgccctgcgcgtatctgctggcccgttacgtcagcacgccgaccgaggtccacctggcgggccgccgccggacggtgatcacgccgcgggccaagctcgtcacgctactgatcctcgctctgtgtttcgccggtggggcccgcgcggtggcacgccgcgtgcgggagcgcgtcacgccctggacgttccacccgtacctgcaaaacgcctacaagcccaaccgtgcggagcttcacaccaaccggtgggggttccgcggcgagcaaatcgaggttgagaaacccgacgatacgttccggatcttcgcattcggcggctcgaccgtcgcctgccaggaaagcgcgttcgagaacacccattgccgcctgctggaaaaccggttgcggcgcgagtacccgaacatccacgtcgaagtccagaacgtcgggatgccctggcacggcaccgaacactcggtcatcaagctcctgttcaacgtccaggacttctcgcccgatctggtcatcatctaccacgcgatggccgatctctttcgtggattcgagcagcctgagttcagcaagggcgactatcgcgacgactacggccattactacggcccggtcgcgggcctggtaaagggccgacgttccgaccattacgggttcccgcggagcacgttcctcggcttctggctttcggacttccgcttcgaccgggtccgcctccttggcccggagggcgagggaatccacgggatcggcatgcttttcgtcccgaaacacgaacccgtttccatcgagacgtggcgcagcctcgacgccttcgagcggaacatgcggacgttcgtggacagcgccagaagccggggcttcgaggtgttggtcgcgtcacaaccttacctgtaccgtgacgacctgacgcagaccgagcgcgaggtgctgatgctgcccatggcctgcatggaagacggcaaacagcccgacctcgcctccatgaagcgcggcatggacgcctacaacgaacgggcccgcaaggtcgcgcgcgaccgccaggtccggttcctggacctcgagaaacggatccccaagtcactcgattacttcttcgacgacgtgcactatacaacgaagggcaaccggaccgtcgccgaggcctttgcggccgacatcctcgattggggtatcatcccgcgtaaggtgcacggcaactgaccgtcgccggtcggccccgaccacgcaacgaaccgcccggtcgtcttcccgccgcacgctcatcgaccccgcggacgcaggctcatccgcaggccgccgcgaacccgaagcgacatctgcgcctccggcgtgaccgaacacccagtcgcgaggtccaggcaataacactggagcacccgaaccagcacggccttgatctcggttacggcaaacggcgcgccgatgcacctccgcgggccgctgccgaaaggcaggtaggcgctgcggttccgccgcgacacggcctccgggaggaaccggtcgggatcgaaccgatcggggtcgggccagtggtccgggtggcggtgaaggacgaaggggctcagaatcacctcgctgcctgcggcgacgggcgtagcgccgatgaccgcatcgaccacggcccggcgggtgaagacccagaccggcgggtacaaccggagcgtctcacacatcacacgatccagcagcgacaatcggtccagaatttccgctgtcggctcctgaggcccgaccaccgaatcgatctcttcgaccagccgatcgcgccacgacgggtttgcgctcaggacgtaccaggaccagaccagcgcgttcgcagtcgtgagctgcccggcgctgcacaacgtaatcacctcgtcgcgggccgcaccgggcgtcacgccggaaccgttcgccgcccgcaggcccgttacaatatcctcgaccagagtggactcgccggggcgtgacgccccgcaggtcaggaccgagccgatgaggtcgtccaggaacgcccggtcgcgccggaaccggcggtgggcgccggtcggaacggcgagcgggagcccgacgatgcggaaccactgccggttgatgaagtccacggatcggtttaccgacgtggccacctgaccgaggtggtcgctgaccgcggcgccgaagatcgcccggaggatcacgcgcgtcgacagccgcgtcatctcctccgagatgttcatcgacgaggagggcgcggccgcccaccgcgagagcatcgcgtcggcctcctcgagtatcgtcggaaggaaggcatcgacccgcggcctggtcagcgactgctggatcagccgtcgctgccgctgtgaatgttcgccgtcgctgaccagcaggccgttgccgagcaacgggcgcagatgtcgggcccggcgcccgttgacgtaggtcccctcgggcgcatggagaaccccgtgcaccaggtcggggtcgcacacgaggtacttgcgcccgcgaacggttcgaaaacagagcaggtcgccgtgtcgttcacgaagacgaagcagtagacgcaggatgtcggggcgttcaccgttgggccccttgagcggaccgtgggcgagccaacgggcgaccgccagccgaagggccagcgggccgaggaacgtacgttcacggtgtgacgctcgctccatggaaatcgacgccgtcccggccccgctacatgatccacgcccgacgcgagatacgatagccgaacgccggcgccgattccactgactcgacgccgccgcggcttgccggatcgctctgcggcagctatcctgcgacgctgggcaatgcgttgatcgttgcgggcgacggctcgaatccggctggatgcggcctcgatggagattggaccggaaaccacgcctgaccggttgctcgaggtcgcgcatgacctcgcgcgacgttttgcgccgcgggccgccgagtacgaccgccagggaaagttccccaaggacaacttcaacgacctccgcgacgccgggttcctcggaatcctcgtgccgcgcgaacacggcggggccggggcgagcttcctgacctacaccagggctctcgagcgcctggcgatgggcgacgcctcgacggcgctggccttcaacatgcacaacctggccgtggggccgctgaccgacccgcggctcgccgagctaccggaccgacgcggacagtcggttcgcgacttctgcgcgtgggtcttcaaggaatgcgtcgccgggcggaagctctttgccaccgccgccagcgagcccgggatcggctaccggctgagccgaatccacacccgctacaaacgggtcgagggcggtttcaccgtcaacggcgtcaagtcgttcgtctccatcggcagccatgcggattactgtgtcgtggcggcccgttccgagcgggacgccggcgacgtcccggggatctcgttcctggtcatcgagcgcggcagccccggcgtccgcatcgacgacgcctgggacacgctcggcatgcgggccacctgctcgaacacgatgcacctggaggattgcttcgtcccgtccgaccggctctacctgctcgaagcaatggccctgtacaagagcgccagagaggcgcattggcacgtcggatcgtgcaacggcgtctatctcggcatcgcctcggccgtcctcgaattcgtcaccgggtacctgggcggccgagccaaggccggaacgcaggagccgctcgccgacgacgccatgatccagcatcgcatcgggaagatgtgcaccgaccttgaggcagcccggtcggtcgtgtatgaggcggcacgcatggccgacgaggccccggggtcgctcgagaccaacgtcgccatccaccgtgccaagtacatggtcagcgtcgccgcatgcgacatcagcgctgacgccatccgggtctgcggcggtggggcgatcttcaagtccaggccgctcgagcggtactatcgcgacgcgatctgttgcagcgtcatgccggcgtcgaacgacgactgcctgacctacgtgggaaaggcgcagctcgggatcgacgtgatgtccccgcgcggctcatactggtgacgcgcccacgagcacacgggcgatggaactcgaagaacaactgcggaaacacctagctcagcggatctttcccggctccgatcccgaccggctcgggctcgatgacgacctgctcgaactcatcgactccatcgaactgatccgcgtcgtcgcgcacatcgaaaggacctacggcatcgaagtcgcggatcacgacatgcatccgcagaacctgagttccgcccgaaagatggccgacatgatccgacgcgcacaacgccgttgaccgggcaaaccgagtggccgcgacccgaaaacccgccgtcagcgccctcaacacctgcgatcggatgatcctccacgctcacgacgcccttcgctcgatgggctaccccggcttcctgaaccagacccacctctggctcgggcggcgcgtcgaggtcggccggctgcgccgcgcgctgacccggctcggcagacgccatccggttttcgtgtcacgggtatcgcgcacgcggcgtcgtccgtgctggacgttccgggccggtgacgagtgtacgcttatggaggcctcactcgacgatgccgctgacgacggcgtgctgcgatacgcggaggcgctgctggcagaaccgatggacctgtcacgatccgcaccgatcagcttccacctgctgcacctgcccgacggtcgcgacgtgcttttgatccataacgatcacacgctgatggacgccaacggcgcgttgccgctcgtcgcggagatcgtccggcttgacgagaacgcggatgaacgcatcgagccaacggtcgccggcgcccccgacgtgctccaccaagtcctccgccgaacgccgctgacgacgcgcctgcgagcggtacgctaccgacgttccgtccggtccgccatctcgcgccacccgacccttacactcgtggaccacagtgccccgcactcggctgatacgcggtcacggttggcggttcggctgctggacgaacggcaaaccgcgaccttcgatgcccgcgttcgccgcctcgacggactccccagcccgtcgatggccctattggcctgcgcattgcgggccgtgtaccgcctggccgggaccggctcccgcgaaacggcgagactcaacgtgaccgtcggaacgaacctgcgggccggcttcgctgaatcgccgaacttctgcaacctggcatcggtcctcgagctcagcgtcgccttgcacgaggccgacgatcgcgacgcgctctacgcagccctcacccgtcagctccgtgagcgaatccaacgcggttacgatctcggccacttgcaggtcacggcctggttcgcgggctttcgccgcctcgtacggcgacgcagccttcgtcggctgacccacgaccattctctcatctacggctatgtgaactggccccggcgcgccgtcgatcgcctttgcgaagcgccgataacccgagtgcatcagccggtcggagtctggtccccacccgggctggcgctgtcggccacacgattcggcgggcggctgagcctgatcgcgacgtccagcctcgacaacgtacccgaggcccgcgtcggacagttcctcgatgggctcgtcgcggacaccctcgcctgacctgacctggactgattcgatgccggacgggtggcaccgctcgccaaacgcggtggagtgattctgcactgcctgacgtgccattcgcccgagcgccgcgggaagcaacgcccgcggggatggacgcgagcaggaagcctcgcaccgcgaaacccgtcacggcaactcgagtcccgtggcggtaatcagccggtgatgagggatcgcgggatgtcgacggttgggccgggctcggggcgcgcggcggtttcgacgaggcgctggacggcggaagcgatgccggtggcgtcgaggccgcactcggccagttgtccgccgcgggagccgtgggcgatgaagcggtcgtcgggcaggcccaggcggatgaacggtgggatgtgcaggctcagcgcctgggcggtttcgagcacggccgacccgaatccgccggtgacagaatggtcctcgacggtgacgatggggacgcggttggcgcaggccctgcggaccatgtcgcgatcgacgggtttggcgaagcgggcgttgacgacggcggactcgatgccctgttcggcgagcatatcggcggcggcgagggcgttgatcgcggtgacgccgtagcagaggatcgtggcatcgtcgccttcgcggagacggcgcgagaggcccatcgaaaacggtgggcagtcggggagcggggccgggacgttgtctcgaggataacggatcgcgcaggggtacgggagggtcaggccgaacttcatcgcctcgaagagctcgtgctcgtcgaccggtgccatcaggatcatcccggggaagccgcggagatacgtgacgtcgaggaagccgtggtggacggcgccgtcgcttccgacgagcccggcccggtcgatgcagaacatgaccggaaggccctggagggtgacctcctggaagacctggtcaaacgcccgctggaggaaggtcgagtagatggcggcgacaggacggaggcccgccttggccatgcccgcggcgatgtccacggtgcagctttcggagatgccgatgtcacgacagcggtcggggaatcgctgctcgaacttgttgagcccggtgccgtcgggcattccggcggtcatggcgtagattcggtcgtcctgctcggcgagtcggatgagggtgtcgacgaatgcgttggtccagcccttgccgccgctgcctttgatggtgaccttcccgctctcgacagcgaagggtctggggctgtggtactttccgggctcggcggtggcccagtcgcagcctttgcccttgaccgtgtggacgtggaggagcacgggatgattggcccgcttaaccacttcgaggatttcgatcaggtggtcgatgtcgtggccgtcgacgggcccgacgtactggagccccatcgattcgaagatctgaccgggggaaacggtggctttgatgccctccttgaggtgggcgagcatgtcgtagacgggtcttccgaggagggggagcttggggaggaggcgtttaatctgggccttcacgtcgtcgtagaagttgctgacgcggaagcgggcgaggtactcggcgacggcgccctgggtcggggagatgccccactcgttgtcattcaggacgatcaggaactggcgtttgacggtgccggcctggttgagcccctcgaacgcgacgccgttgacgatgctggcgtcgccgacgagggccacgacgctggtgtcgcgaccgaggagggtgtcggcccgggccatgccgacggcagtggcaatggcggtgccggcgtgtccgacgttgaacaggtcgtattcactctcgctgatttcggggaagccgctgattccgccggctttgcgaagggtctcgaagcggtcgttccggccggtgatgagtttgtgcgggtagcactggtggccgacgtcccacagaaggcggtcgcgggagaagtcgaagacgcggtggagggcgatggtcagctcggtgacgccgaggttgctggtaaggtggccgccgttgtggccgacaacctcgataatccgttggcggatctcctcggcgagcgcgggcagccgttcgcgcggaagggctcgaacgtcggcggggccgtgcacgctttccaacagactcaacctctgctcctctgtatgtggtgactttcgtcgcctcgcggatgcgtccgcgctcgcggggattgtaatcgtgatcccgcgcgggttcgagtttcagggatttcaataatgtcgtgccgcacgttggcacgtcgatcgagcctcaatgcccggttcaccgctgtcctgtgcctcagtgggcgcgattccaggtgaacgacgccagggctcgcaggtcatcggcgtccgagccgaatcgatcgatggcagcgatcgcgccgcgtgcggctccttcggcgacggcccgggcccgctcctctcctacgcagcgcgggtaggtttgtttgcccgccgcctggtcctttcgtgtctttttgccggtctcggtctcgcaagcgttaacgtccaataaatcatcggcaatctggaacgcccggcccaccatttgcccgtaccggctgagcgcttgcctggcgtccggctctgccccgcccgccagcgcacccagctcgcaggcggcgcgaaacagggcgaccgtcttttgttcatggatggactcgaccaactcgcgagacggcggctcgtgctcggactgaagatccagcatctgcccgccgatcatgccgctccatccggtggcccgggcaacggtccggatcatgtcgcgggcgatggcggcgtcacacacatctcgtgagatcagatcgaaggcgagggccacgagcgcatcaccggcgaggatggctgtcggctcgtcgaagcgtcggtggcaggttggccggccgcggcgcaggtcgtcgttgtccatggccgggaggtcgtcgtggacgaggctgaaggcatggacgcattcgatggcaaccgcagcggtccaggcatcatccggcacgggcccgaacagcttcgcggtggcgactacgagaaagggccggatccgcttgccgggggcgagggccgcatatcggaccgcgtcgtgcaggcgcttggctacgggctcggtgggggtgagtagccggtcgaagcgaccgttgaactccgtggcaaacgcccgcattcgctccgcgaaatccggatgcatcttcgattcggtgttgccgtgggttccagcggcgatgcgtggctccttgctgagcgtggtgccggtccggctaaatcacgccgggtacgacatcgatcagcgccgccgccacgtcgcgcaatacgcccagggggtgctggtcggcgttgatgtcacggatcagacccaggtcatacgagcccaacacgggtgccgtctccctctcgtagacgtcgatgcgattgcggataacgcctcggtcggcgtcgtcgggccggccctgcttggcggcccgccccgatagccgcgcgacaagggcttctttgtcgttcatcttgagatgaacgatccggtggacgtcgatgatgccccggagcaactcgacctgacggactgttcgaggtatgccgtccaggatcagagtgtggtaatccggcctgacctcccccgcccggatgcggccctcgacatggtgacggaacacgcggacggtcagctcgtctggcacgagttgacccttggtagagtacgaaaggaattcctttccgatttccgattgcttgtcgagagcgcggaagatgtcacccatggcgaggtggacgaggtttggcatccgtccgagtacgacgccctgcgtgcccttaccgcagcccgggtatccgaacatcagaatcgcggcgtagtgcgtcgaatccgccatacgtttctctgctcgtatcatggacggcgccgcttaccgggccacgccgccgtgcgcgcgattgaactcatcccggagcgccggatcgtagatcctgatattaccgtcccggaaaagcctctcatagaggtcggccatggcctgctccgcgagacgctcccgccggagctggacgagttcatcccggacggcggcgaaattcggggctgaggcagggatccgctcttcgagcttgatcagatggtaccactcgccggcccggacagcgctggaaacggcaccgggcgcgagcgcgaaagcggcctcgcggaaggcatacggcacctcgtcgtggcgacgggagaagacctcgagccgtcccccgtgctgggcactggtctggttcgcactgtagcgccgggcgagttccgcgaagtcctcgcccgcggccaaccgctcagccatccgcatcgcgtcggccaccgaggcgagctggatgtggcgtacccgcacgcgttggccgtaagctcgctcgtactccgcccggatttcggcctcggtgggatcgaactcgcggaacgcaatcgcgcgcaacagcgcgttccggcgcatcacgatgcgaaaaacctcgcggtcgaggttccgctgttcgagcagtgtgctgaggagccgctccgccgcctcgcggtccaggtcgccctccgtcacggtagataaggggtccgcaagccggcgcagcgcccgctcggtctcggcctcaacgtccgcgggcgttatcgtgactccggcttcggcagccgtttgctctgccaattcgagactcacgagctgatcgagtacggcggctccttgggatcggatcagcagatcaatgacctggcgccgcgagatgggtttgccgccgactcgggccatgagcggctcttcgggatccggagccggtcgaccgagcgccgacggcgcctcacgacggacgagatcggcggatgtctgctcgcggcgcggtggatgcgggcgcgtccatgcaaccgagacatcatccagcggcgccggcgccggctgtccacatcccgacaggcccgcgatcagccctacaaacgaccaaactctacccattatggcgtgcattgctggcccgatcgaccgtaacgctccgttgccggacggtcaacgagcgggattctcaatggtccgcggcgcggcagcgctttatgatgtcggcgccccagacggtcggccatcggacgatcgaaacgtcggaggcggggtcttggacggacacggatcgaagatggacatcgtagtgctgggaacggggacctcgcacgggatcccgatgatcggatgcgactgtccggtctgcacgtcttcggacccgcgcgatcgacggacgcggaccagcatccacgtcgagttccaggcggccagcctccttgtggacaccgccccggaactgaggctccagtgcgttacccacgggatccgccgggtcgacgcggtgctgtttacgcatcaccacgccgaccacgtgatgggcctcgacgacctgcggcgattcaacgcgatcatgaagaagcccatcccgtgctacggagccgagcgaacgcttgcagcgttgcagaagatgttcgtttacgcctttggcgagcagccgggatcgccgcacagccggccccagctcgagctacggcctatcggttcaccgacgttcgccgttcacgacgctgagatcggcgtgattcccctgatgcacgggccgatgccggtgctgggcttccggtttgggccgttcgcatactgtacggattgtaacgcgatcccggccgactcgatggagctcctacgtgatttggacgtgttgatcctggacgccctgcgaaacacgccgcaccccacgcatttcacgctcgacgaggcggtggagacggcccggcggattggggcggggcggacgtacttcacgcacatgactcaccaactcgggcatgcggagacgaattcgaggttaccggactctatggagttagcctacgacgggttacggatccggctttgaccggctggcctggatctttggacggaaatgagttccgtaaaaaaggcgtgcggcaccccgaaagttattggcgcggtctaagggtgccgcagcgagtggaagctcgataatttttttcagccggaggcgatcatggaggcttgacacgccgcatgagtcgcgcagccgtttcatagtatatcgactacttttgcgcgatcaagagacttggcgaaaaatcctgcgcgcggctcgcggctcgttccgaattgcacaatgccccggcgaaaccggcgttgaaaccatcccggcgatgcggtcgataaccacgcgattggctcgcaccgcggcggcgttacgggtcgggcattgttgacggtatggcccggcctcgggtacgatgaaacacgggctcggccgcgtttcatgtcagcgggacagccgccgcgtcggtccattttcgagcgctggccgcggtggttctctcggactcgtgccgctacgggaagcggagccgccaagctccgcctggctgacgactcggaggggatctgatgatgccggacaatcgcacgccaacgactgagcatcgcccgaagagcctgctttccggcttccagcgctgcctcctggtggtggccatgacgttggccgggctcctcatcgccaacaccctgtaccttctggggaaccggctgatctccgcgttccccgaaaccgccgtcgggtcgttcgcccaggggacccggacgatctcgtatttcttccaggcgatggttctatcacacacggggctggggttcgtggtggtggggcttctggttggttttgcgatctggcacctgccgacggtctggcggcgacaccgccggcagacggtggtcagcggtctggcctttgtgtcgacagggttggttctggctgcgacggggccgttcatcatgtacgcggcggcgacccgcgatcacagttgggtgtggtggacgcacctggtcgcggcggcggtcgtaccagtcgcgtatgtcctgcaccggtcggtgtcgtacgtccgacccgcgcgaggcaactacgcccggtttacgacggttttgacgacggcattgatcgtgatgtttgccggtcacgtctacacggcccgtggcccgagcctgacccccgaggcgctgctggccaaggcggagggcagcaataccggcccggggtcgaaacaacgggacctgatggaattcgtcgacggcgtgtacgtccctcccgggttcgtgccgccggggagcccgttctttcctagcgccgcgacgacgacgacggggggctatctgccggagcggattatcactcgtggggacacgtcgtcgccggagaagctcgcgccggacctggacacgatcggcttcgtggtcaacgagaagatcggggcggagacgtgcgatcggtgccacgccgatatcgtcgagcagtggtccaggtcggcccaccgcttcgcgtcgttcaacaatccgttctacgaggcgacgatcaacgacatgcggaagaacgccttggccctgacggagggcgtcgccgagcacatggaacggttcccgcagtggaagggacgaaccggagagatcaagagcaagtggtgctcgggctgtcacgatccgtcgctcatgctggcgggcgagatgacggatccgatcgaccgccgcagcccgcaggcccaggcgggcctgacgtgcctggcctgccacgccatcgacgaggtccacagccagacgggcaacggtcactacaacgtcgcggatgagcaggaggatccgttcatcttcccgaccgcggcgacggggacgcttgccgcactgctgcatgatacggccatcaaggccaagcccgaggtgcataagcgggacatgctgaagccggtgttccgcacggccgagttctgttcggcctgccacaaggtgagccttccggagccggtgaacaactaccgctggttccgcgggcagaacgagttcgacgcgtggcacgacagtggggtggcactgaacgcgtcacggaccttctacctgccgccgaacaagcgtgtgtgccaggattgccacatgcccctcgagccggcggtccacggcgatttcgcggccaaagacggcatggtgaagtcgcaccggttcctggcggtcaatacggccctgccgttcatccgcggcgacgacgaaacgatcaggcggatcgaggcgttcctgcgtgacgagaagctgcggatcgacgtgttcgccctcgttcgcgaccgggacggtgaggccgacaccgtgtacgccctgaaccacaggcagccagagttatcggccggggagacggtgacgttcgacgtggtcgtccgcaacctcggcgccggtcatacctttccgggcgggacgaacgactcgaacgagtcgtgggtcgagttcaccctggtcgacgaccacggcgagcgaatcgtccagagcgggtacgtgcgggaggacgggtacgtggatccgacggcccactacttccgagccgtgattgtcgaccggcatggggagccgattcggcggcgaaatgcacaggacatctacgccccggtatacgtaaacgtgatcgggccggggacggcgcaggtggttcactaccggatgaccgtcccgccggagctggctggacgcaagcttaccgtcgaggcccggctgatgtggcggaagttcgatcgggcctataccgagttcgcgttcacgagcaaccgtgcgggattcaaacggtttgacgatgtcccgaaccttccgatcacggaaatctgccgctcggaggtgtcgttgccggtggtcggaccgggcgagacgccggctccatcgacgcgggacgtgaccgacatcgatctggcggccgactggttgcggttcaacgactacggcatcgggctgttacttcaggacgacacgaaggcggcccagcgggctttcgccgaggtcgggcggctggtccccgagcggatcgacgggccgcggaacctggcccgcgtagccctgcgggacggcgagttggagacagcctacgaccacctgcttcggtgcgaggagattcggtccaacgacgcgcagacggcatggttctggggcgtgctgttgcaggaagatgggcggtacgtcgaggccgcgagcgcgtacaagcgggtgctggatcagttccctgaggaccgggccacgtgggggaacctggggcggacgtactacctcgacggcaagtaccgccagtcgatcgaggccatgacgaaagtgctggcgatcgatccggaagaccgtgtggcccattatcacatcatgctcgctgcgagggcagtcggggacgagctgctggctgcgaaccacgaggaggcctacctccgctacaaaatcgacgagtcgcaggcggaggtgacgaagagctaccggctgaagaacccacatgacaacctggagtcgcagagcgtgcacgtccacgatctgagcgtggcggggtccgaacgggtcacgcggcgacgtgacgcagcgtcggaggggacgcgttgagttcgagaagctcgtgcatgtcggaatccacgctacgaggcggcgcgccgcccccgcccgaccgtgtcgcggccgcggcggcaatgttgggtgcgtgtctggtcgtgctgtgcacggcatgcaagcccgcgcggcacgagccgtcggttcaggccagtgagtacgtcaagcccgatacgccgccgaagtacgaaccaccaagcggggccgtggaacagagcgtcacgttttcggacgtgacaggggctgcgggaatcgagttccggcacgtcaccggggcgttcggcaagaagtggatgccggagacgatgggcgggggggcctcgttcttcgactacgacggtgacggctcgcccgacctcctgctggtcaacagcggcttctggcccgggcatgaggaggacggcgcgaagccggtgagccgactgtatcgcaaccgcgggcgcggcgagttcgaggacgtaaccgagcgggccgggctgtcggagctgacgctctacgggatgggggcgacggtcgcagactacgacggcgacggcgatgaggacgtctacctcacggcggtgggaaagaaccggctgcttcggaatgacggcgggcgttacgtggacgtgacggacgaggcgggggtggggttcagtgccggcgagggcgcgccgtccccgtgggaatggtccagcggggcgatgtggctggacacggaccgcgacggcgacctggaccttttcgtggccaactacgtgcaatggacaccggcgaccgatatctggagcacgctggacgggaagaacaagtcgtacgcgacgccgcaaccgtatgacggcgcctcctgcacgctctttaccaacaacggcgatggcacgttcgcggataccaccaagcaggcaggagtgtacaacccggcgggcaagagtatgggggtcatctcggcggacctcaacgacgacggctggcccgacatcgtagtgaccaatgatacccagccgaacttcctctacctgaacaaccagaacgggacctttacggatcacgggctcagcgccggcgtggcgtatgacgaaagcgggctggcccgggccgggatgggcgtgggcatcgccgacctgacgaacgccggacgctgctcgatcgcgatcgggaacttcagcggcgagccggtttcgctgtacacccaggccggtattgggacgttcatcgacaaggccggggccacgcggctgaccaagccgacgacggcgacgctgacgttcgggctgacgttcgccgatttcaacctcgacgggtttgaggacctgatgctcgccaacgggcatatcgagcccgagatcgagcacgtacgcagagggtggacgttcgagcagagcccgcagctcttcctgaacaacgggcgggggcagttcgtcgaggtcggcgaggaggccggcgagggattcaggcggccgatggtcgggcgggggttgtcgacggccgacatcgacgacgacggtgatctggatgcggtgattgcgacggtaggcggcgctccacggctgcttcggaacgaccttccgccggggaacaacgtcgttcgcgtcaggctggtcggggcggggaagaaccgggcggcggtcggagcccggctccgcgcgaccctgggcgggcagacgcagacgcgctatatcacgacgggcgggtcgtacctgagccaatctgagctgacggccacgttcgggctcggcgccgccgagacgatagatcggctggagatccgctggcccgatggtgagtcgcaggacgttgcggggctggcggccgatgcgctgtacaccatcgagcgcggcacgggtgtgacgcacacgaagccgttggaacggtagccgtgtgccggtgcgagaatgctctctcgcatcagccgacgcgacgcgggttcaccgggcatcgagcgagcggaggaaccggaagtcgaagatgccggtgtcgtggccgtcggaccagatgagctggatggcgtagttgccgacgagctttgcggagacgacgcgcaggcccgatgggtcggccttgaggatcttcagcggattggcacttcgcttctcccgttcggttcggcacgtagcgcaggggcacacgcgacggagttgagctagcgcgaacgcgctgtggtgcccgtcactccagtcgataagcagcttctggtcggctagcttgaccttgaggtcccgcggcgtcgaggccggagaacggggcggccttcccgcgccgccgctcgcgtcgccgggtttgtcccttcttgattcaccgttcatggaaggtcggctccgagtccagaaaggcaagaaggcagaatgcgagtgcacgtagggcgggccgtgcccgccgcgggggcgggcatgacttccggcttcgatgcaagtgcgaggatcgtcatgaccttcgatgcttctgcaacagatcgaggatccgcagcatgttggccggcagcggggcggtgaactcgatggggcgctcgttgatcgggtggaccacgcggaggctgtgggcgtggagggcctgatgctcgatcagcggggcgtcacttccggcgccggttagatcatgttcggaaacggcccgtccgccgtagagggtatccccgaggatcgggtggcccaaggaggccatgtggacgcgtagctggtgggtccggcccgtcttgggaaacagggccacggtggtgtagccgcgatatcgctcctcgacgcgatactcggtgacggcctctttgaacatggcctgccgcggcgggatcgcggtggggaggatcatccgctgggtcgtgtcggggtggggcgagagcggcttgttgatcacgtcgccgtcgagcttgatctggccatggcagatggcgaagtactccttgcgggtggtgcggcgttcgaactggagcgcgacgcgccagtgggcctcgtcggtcttggcgatgaccaggactccggtggtgttcttgtcgaggcgatggaggatgccggggcggaagggctcgctgccggagctgatccggtcggcgtagaacgcggcggcgttgacgatggtgccggtctgcccagggtagccgggatggcagacaatgccagcctgcttgttgatgaccagcagccagtcgtcctcgtagatcacgtcgagggggatgtcctcggggacgatgtcggtcggcggcggtggcggaaggacgagcgtgatgacgtcgccctcggccggctcgtagctggccttggtgggcatgtcgttgaccgtgacccgcccctgtttgatgaacgcctgaagcgtggtgcgcgagatgcgggggaacttggcgcggaggtacttgtcgaggcgccggcccgggagacggcggcgaacttgaacgacgtggatgtcctcgtcggccgagtcgtcttcgtcagaggcctcacggtcctgctgcggaccggctggccccgcggatggttcgtctgcgggcgggtcacgcaatggtttctcgttcgcggggtgcatggggtcagcgcgagtgggcccggaagacggcctggaggtgtgtggcccgacccagcgcgtcggggtcgcggcatagggaggtttcaatgctcgtccacgcgcgccggccctccggcgtttcgagcagttgtcggtggtgacgcatggggagcacggtcttgccgaggatttcgaggaggtcgaacccgcattgctcggcgaggcggcggacgccgctgggagaaaaagtcgtgatgtcgaatcgctccgcggcgtcctgtgtaagccagtgggttcggccgtcgcggacaaagcgggccagttcgcgggggtcgcccttggtcagatagaagtcgatggcggagagcttgttgtcgaatgtggcgaccaggacgccgtcgccggtcaggacgcggcggatctccttcatggcgcgaatcggcgattccgcacatccgatcgggtcgcccagggcgacggccaacgggaacacgccgcggtcgagcgcgcccaggttgcaaaggtcggcctggacgaatgcggcccggcccgcaggatcaagcgggtcgagcttgagtcgggcctggtcgagcatccggggcgagatgtcgacgcaggtgacggcgtacccgctcttggcgatccgcgccgcccacttgccggtgccgcagccgaggtccagcacccgggcccgcaggtcgcggggcaggaacggtcggaggtatcgccaggtaagggcgtcgtgccactgccagtaggcatcctcgtagctggcgtcgtaacgagcggcgacgcgatcatggtacttccggacggcggatttggggtggcgcggcatcaacccacattgtaagggggcgccttgcgccggcaacgcagggcgtgcggggcggttgaccgatcggccccgctttgggacgatggagccgggttttcgtacggaacagaggcctggagtcgacacaccgatgatgatcaaagccgtggatctgcgcaaggggcggacggtcctgtacgagggggagccggcggtcgtccatgaggcccagcatgtggcaaagggcaacaagcgcagctacatgcagacgaagatcaagaagctcaaatcggggacgatgacggacgtccgctttcgcgtggacgaccaggtcgaggtgccgttcgtcgaatcgaaggagtacgagttcctctaccgcgagggtgaccactacgtggtgatggacgtggagtcgtatgaccagattccggtcagcgctgatgtggtgggcgacgccgtgcagtggcttcgcccgaacgaacgggtctcgtgccaggtctacaacggccagatgatctcgttcgacgtgccgcacgtggtcacgctcaccgtgactgaaacgccgccggtagtgaagggggcaacggcgacgaatcagccgaaagacgcgacggtggagacgggcgccaaggtgcgggtaccggcgttcatcgagcccggtgaacggatttgcgtcgatacacggagcggggagtacgtggagcgggcgaagtaatcctcccttggacctcctgacggtgcacaaaaattatcggacctcccctcggcatcgggcccgatccgcaccgattgcaggctagaatagggcactcggggtcggcgtcggcacccgaggtgattccgtacgaaccgcattcgagcctccgggggttgcatggttggggtaaagcgcgtggcttcacgtttgacggctgccgcggccttggccgcggcgttgtcgggcttggcttgccaggtgcgggccgacggggagctgaggtccgagttgttcgtttcgggcctggtacgaccgttgttcgtcaccttcgcgccgggggacacgcatcgcgttttcgtcgtgcagaaaaccggccaagtccgggtcgtgctggacggcacgcttctggccgcgccgtttctggatatcggggcgctggtccgtgcgacgggttacgagcagggactgctggggctggcgtttcatccgaactactcgggtgattcggagcttccggggttcggcgagttcttcgtcaactacacggctgcgggcaacgacacagtgatcgcgcggtactgcgtgtcaacgaatccgaacgtcgcagaaccggcgggcgccgtcgtgttgacgtacgctcagccccagagcacccacaacggcggatggatggccttcggcgccgacggctatctgtacatcagctccggcgacggcggcggcgcgttcgaccgcgatccgggtcacacaccggagacgggcaatgcccaggatacgaccaagctgctggggaagatcctgcgcatcgacgtgaacggcgacgactttcccgccgacgacgaccggaattacgccatcccgccgacgaatccgttcgtcgccggggccggggcggacgagatctgggcgtacggcttgcggaacccgtggcggtgcgcgttcgatccgctgacgaacgatctgtatatcggcgacgtggggcaggcggagctcgaggagatcaactttctattggcgggcagcgccggcggggaaaactacgggtggcgctgcatggagggatcggagtgcaccggtctggaagggtgcatctgcttcgacgacgcgctcaccgacccgatccacgcgtacgcccacccgacgttcggccagtgtcgctccgtcaccgggggcgaggtctatcggggctcgctcatgcctgggctggcggggacgtacttctttgccgacttttgcacggggcagatctggagcctgcgctacgacggcgcgtcggtgtccgattttcaggaacgaacctgcgagctcagacccgacggcacacgcacgatcgccgacatcgcttcgttcgggcgcgacgcgctcggtgagctgtacatctgtgatctctatgacggcgaggtgttcaagatcgtgccgtccgagggaatcctgtcgagctttccgcccgatggatccgtcgacgcccgccgtccgtccgacatggacgggatgaacgcagttgggtggagccatgtcgagttgacgctggacgtcgtggtggattgtctgacggcactggacttcgccgtgatgcagcagggcggcaaggagccggcgcccccgggcatcgccaaggtagcggggcttggccctggccggatccgtgtggacctcgatcggcccattgagcccgaagcctggacgagcattgagcacgtgccgacgggtagcagcgtacggctcgggtacctgcccggtgacgttgacggcgatggggcggtcacggtcgacgacatcgacatactgctcgccgtgatccgcggcgctggcggaccggcgcaggcgtggtcggtcgacatcgatcgttcgggccgctcggaccagatcgagctgctgaccctcctggacctgttggtcggcgccggggcgttccaaccctatttcggcgcgacgctgccctgagcgtctgccgactcgccgcgccattcgaggttcgtcgacccgcaatcaacgcgccgcgtccgaccggatgaagcgccgtacgcacgtcgccgtcggtggcggggcggcgcatggcgctcggtcgccggcggcggatcgcgcgtcgaaatctcttcgacaaggcatgtcggcgcgacgactgcaagcgaaaaaacggaaaagttttgaaaatttttttcggccgcgctgccccgccgttcgatggttcggatggcggcgaggacaacgacgacgatgcgcggttcgaccttcgacttcgcgatgatccgcgacttgcaacctgttagatcgtttgcggcgcggcgcggcgcggcccgaccggcgcgttcgaggtgcgatccgttcaagcgggcgcggatgcgcccgcagtcgccggcgctggccgtcgtcgttggacgcggatcacggccgcaggtatgacaaaatgcctaattctcagcgggttttcgcgatccgcaaagctgcggatcggcggcgcatcgcggctgcgctgcgggcaaaccacaggccgaaggcgcccggtgatcataccgccgcgcgacattaggtcgatgttccgcagcgtacgaatcacgtcggccgttgtggcgacgactcgttcggcgcaccgcgtcaccgtgtcgcgccgcggcgcattgatggtcgttacgacctccgcagattccgttcgcgaacaccgccgtccagcggcgcggaccccgcggacgacccgaatgcgcaaaattttttttgacaggtcgcagtcctagtgtaggattttgtccagaaaggaggtgatgcagatggcgaagaaacgcaaagccgcaaagaaggcgaagaagggcggcaagaaggccggtggcaagaagcggaaagccgcaaagagaaagaagaagatgtagtgatgatccacccgttggggaagcgacggcgctttcagttgaccggctctcgccacggcagtcggtaaagccccgaagctcccgggcgggcttgttcggacatcacaaggtggaaggtgctacccgccacggcggcaccttccatccttttttttgcgcaaggcacggaggcacgaagaagtgggatcgagggatcgaggtagggacgaaaggacggaggggagggcaaagcgccgcctcgccgattccgagggacggcgtcgagcatgcaacaataccggtttcggagcagcgcgggtcagcaagcggtccgcgccatccgcgttacaaccgctgcctgacccttcacatcgctgtgcgacgtaagaaggtcaggcggtcgcggctcggaggggcgtcggccgcacgttctgagcccgtcgcgggccgggcatcgccttatggggcgaactcgtcggtcttctcgtagccgtcggggacgatgagttcgaaagggctacgcacgaagctggggttcacgacgaggttggttagggtcaactcggtcgtgccgggctcgccctcgcggttttcgtagtgtcgtacgacgcggcggggaagatggtccttcttcgagaagtaccatgtggtctccggtccctccttgggcttgacgaagacgacgacacaagcctcgcccgcgacttcggcatcgggcttcatctccgccgagccgctctcgagcacgtcggcgaacggatcgggctccgcgaaatcacgaagcagcacccgcatgatgttgcgaccctcgctgccgagcaccgcctgatccatatcctggtaggccgtcttcttctgctgatccagcaggtagaactcggtgccgttgcacccagcggtgtacctcgacttctcctccgagccggacgcctggatcgtgacctcgcaagagaagcgatcgatgtcgtgctcggcccgcggcccgaccaccgcccggcccgtaacggcgggcacgacatttacggcccactcggtgccgtggtactcggcgtcgtagccgacggtcttggcctgcttcatggcctcggccgcctgcttgaggatcgccttgacctctcccggctgccggtccggctcctggccaagggcggccgtgcaacacaccaggcctgttgccgtgaagatcgccgtgcgcatcgcccttctccttacgaaatcggcctcgcgaatactgggtggatccctcgggttccggtccgtcggtgatggcgaccatcgtacctcgaacggggccacgaatccacggtgcccgacgtcagaacgggttcccgcattccgggcagcgtcgcaggggaagtccggccaacagatagccgcaatgttcgcagcggccgtccggctcgtcccgcgggtcgtgctcgaggcaatgccagcactcggtgaactggccctcgatcagctcgccgcaatccgggcacacccacggttccttgggcagggaagcgcgcagggcacccgattcgtaccgttcgacgagggcccgggcgggcgcctcgtcctcgtcggcgagcacccagatttccggcatggccaggaagaaggggacgtcgccgaggaccgagcccgttgcctcattgaagaccgtggtgcggattccctcgtccgcgagaagcccgcgcacgatctcaatggcggaccgatccttggacgcgaagacccgcttcatgcctccatgatacctatctgcgctccggcccgcagggcgacgcccgaccagccgatggccggccgtccggaactcctctacactgccgcggcatgtacctgccgtttctggtcacgttcgtcgtggcgtcgggtgtggggctgctggcaacggcgctcgttcgccgctgggcccgccgcatcgggttcctggatcaccccgttggccacaagcaacacgcggtgccggtggccctgggcggcgggattgcgctggcggtgtcaatctgtggactgcttgcggccggcgctctagcggcctacgccatgcagcggcagtggcttcccgtggtgctgcccgagccgctccgtccgcatctgccgggaatggcctcgcggttgccgttggtcctggggatcgtcgctggcgccttcattctgcacgtcgtggggctgatcgatgaccgaaaagcgctcgggccgctgccgaagctggccgcgcaggtgattgtggccgtcttcacggcctgggtcctacaggttcgcgtgttcgagttcctccccacatctctcgcgatcgcctgcacggtggtgtggatcgtcctggtgaccaatgcgttcaacttccttgacaacatggatgggcttagcgcgggtgtggcggcaatcggggcgtgtatcttcgcgctcgcgggaatccggtccggccaggtgctcgtcccgctgatggcgggcgtcatcgccggagggctttgcgggttcctgtggttcaatctcacgccggccagcatcttcatgggggacgcgggcagcctggttgtcggctacctgatgagcgtgctggcggttctcacgacgttctacgatccgtcgctggacctgcggcccgtcggcgtcctcgtgccgctgatcgccctggccgttccgttgtacgacgtggtcagtgtggtgacccatcgaatccgggagggggtgagcccgttccgcggggactggcggcatttttcgcaccggctggtcaaacgcgggatgagccggcgcgacgcggtgctgacgatctacctggccacggccgcgacggggctgcccgcgatcgtcctgccgcgtgtggatcgagccgggcaggtgctcctgatgattcaatgcgtatgcgtcgtggtgatgatcgccgtgctcgaacacaccggccggcccagagacgaaccctgaaggaagggactttcagggacgcaggttgcccatctcgacgcgacgcgtcgcgaattgcggcagcagaaagttctcgccggcgaattgcgtcacctcgccggagacaaggaaaaccgcgccgacaccctcctgctcgacggccgtgaccatggtggccgtcacgagattcggcagcagcttcatcggcggctcgcggtgatccgggtgatccgactcgaagatgaagagccaccattcgtcctgccggacgacgcgaccggcccgggatgccatgagcgtgccgtccggcacgaggcccggcgtgtaggcgacggatccggctgagaaaccgtcctgcccggcctggagcaccgggttgtccggttcgcgggccttgaggacggcgagcacgtcatcgacgggtgcatccggggcgactacgtcggatggcgccccgctgggcccgctcgtattcgcctgcggcggacgcgctcggcgcacgtcccgcacaagaaggtagttctcgccggcgtagacggtcatgtcgcccgcgatgatgaacggcacctcgaccgcagcggctgtcgcggtgcgaaccatgacctcgagggatgagtcgggaaggagcttgatgggcccggcgaaccgcgacgactcgccgaggagcgtccaccacgacccgctgcgggagagccggcccacgacgtcgacgacggtccaaccctcgggccagagcttgggctcgtgcggtgggaattcgccgcccgcggcactggcgggtgggatcggttcgttggcaggccggcggcgctggagctcgcggagcaggtcgtcggccgttgccgcttcggtcgcatctcgttgatcctccgccgcttgcacggtgggtgaatcggttgggccagccggctcggcgccgggttgcttcggcgccaagacgacgatcgtgaggatgccgagagcgaacgttccagtcatgtctcgcccagcgtgtggcggttcatcaacggcaactgaggcggcccgcaagagcctgcctcgttggaagtatcgaccggtggcccggacgtgtccagacgaagccgcaaggactcggcctggtcatgcgtggggttccgggcggccaccgccgctggcgccccttgggctttggtcgtttcgccgacgccccggtgtaccgcccgcggacatgtcgacggttgtggagccgatcagggcgttcggtcgagttgcttcgccaaatcgtccggttcggtgaccgggagctgacatcggtagtcctcgcagacgtaggcggtgggacggtccttgatcattttccggccgcgcagaagcgggatgtcagtctcgtcgcgcgcgtcggaggcgtgcacgacgaccttgttgggcaggtagcggtcgtagacggtgcgaagcagtgctttcgtcccggcgtcgtcgagctcgccgacgatcgcgatttcctggacacgatcgtgatagaaatcggcggcgcagatcagccgctcgaacgcgctgggggactgcttcgccatcgccgcgaacgcccgcaggatcgactcggcctctgcccggtagtcctggcgatcgaccagaatcgcgaggcggagcaggttcatggcatgcacggagttgcccgaggggatcgcgccgtcctggggatccttggagcgggcgatcaactgctcgctgtcggctgcggtgtagaagaagccgccgccatcggggtcgtcgtagtgcttgacggacagctcggtcagctcgcgggcagcgtcgagccagcgccggtcgaacgtggcctcgtagaggtacaacaggccgtcgaccatgaaggcgtaatcgtcgaggtagccggtgaggcgggccttgcccgcccggtaggtccgcagcaggcggccgtcgggcgtccgcagcttacgcagaatgaagtccgcggcgcgtgccgcggcctgagcgtatcgcggttcatcgagcacgcgggcgccctttgccagggcggcgatcatcaggccgttccaggcggccaggaccttgtcgtccagtccgggtggcgtgcgtttcgatcggaccgcggccagttgtctccgccatgacgtcagctttttccggagctcgtccacatccagttggtggagccgggcgaaagcctccggcggcttggtgacgtgcaggatgtttttcgggccggccggtgcgtggccgcgatgctcgaaccagttccccgtttcggtcacgtcgaagtacttgcagaaaagcgcgccttggtcgtcgccgaggatggctttgatttcgtccacggtccagatgtagaacttgccctcgaggccctcgctgtcggcgtcgcggctcgagtagaagccgccctcgggcgattgcaggtccgacaggacgtagtcgaagatgtcggcggcgaccgaggcgtacagtgggttcttggagacctggtacgcatcgaggtagatcgcgctgaccagcgcctggtcgtagagcatcttctcgaagtgcgggacgagccactgcggatcggtgctataacgacagatgccgccgccgatgtggtcgtagatgcccccacgggccatgtggttaagcgtcacttccacgacttcgtaaaggtcgctcgttcccgtccgccgatagacgcgcaggatcagatccatcgcctggctcggcggaaacttgttgccgccgctgcggaagccgccgtgcgtacggtcgatgtagccggccaacatcttcgccgtggcgtcgacgtgctccttgtcgatgacaccctccgccggtccgggcccctcggcccattgggagaggaacttcctcgcgtcctccgtacgctggatcagggccggacggttgtcggtccacaattgacggatctgctggagcaggccgatgaactgctcctgcgggaaataggtccccgcaaagaagggcgtgccgtcgggcatcagccaaacgctcatcggccagccgccatggcccgtcgtctggacggtgtaagccatgtagatcgagtcgatgtcgggccgctcctcgcggtcgaccttgatgctgatgaatccttcattgaggacagcggcgacctcgtcggtctcgaagctctcgtgctccatgacgtggcaccagtggcatgccgcatagccgatgctgaggaagatcggtctatcctcgcggcgggccctttcgagggcctcgtcgctccactcgtaccagtcgacgggattatgagcgtgttggagcagataggggctcgtcgcgtcgatgaggcggttggtatgcgccggtttggcggtcgtctccatgtcggatgtctcctcgcgcggcgcgtcggtcggcgtcgtcttcttgttttcgaggccggaaacgcaggtcgccgccccgaggacggctgcgacgggcaggaagcgacggcgacacgagcgcagaatcatggtcttggcaatccaggtggttgagttccgttcgacggcccttcgcttcgagtcctattctatgggcggcgtatccacggtcaaaaaaagagcccggcggcacggatcaagtccgcgtcgccgggcatcgtgtctaccttgctgcggccgtgcgccatcgcgacggccgcggggctcggctatttgccgcggtgcatttcgcgcggcgtggccccgtcctgcggttcgtggatcagcccacggctgcggagctgctgtacatcgaagccccgctctcgggcgtaggacggcgtcagacggatgtcgacgttgctgcgcacgacccgcctctcaccgttgtggacgatatggaactcggtttgcgtcggaaccagatcgctgccgacctcggtcacgacgaactgcacggactcgagctcgttgtccacgtcggccgtgagcgcctcataatcggcgacgaagccttcgggcggcgttaccgtgacggtcacgccccactcgccgacactctcgaagacgaacggatagggctgttcggcctgatcccacagcacgtattccggctcgatgatcaacagcagcgagccggtctcgatccgcgtcttgccggggagcttctttccatcgacccggacgatctgttgcaggtgcttctgcttcgtctcaccgcagaggaggtcgctggcgctgacgcccaggggatccggaagcacggtcttggtcgcgtcgttcgaaatcacgacatagtcgccgggcggcaggttgatcgtacattcgccgttgacatcggtcgtgcagcagccggcggccgggcacgtggcggcgatgcattcgtaatactggtgcgaaatgccgccgcaggtatcgcgggcgcagctcccatccgacttgtcgtacgcacagacctcgatgccgacgagcggctccttgtccgacccggggaacgtgcccgacccgacggtatgctggttggcttcgatggcgatgttcgccccatgtagcaccgtcacagcgacgctctcggaactcgagttgccacaggcgtcggtggccgtaaagagcaccgacgttgtgtcgcctgcggggaaggggcccggcggaaaaccgcccacaaccggggcgggatcgcagttgtccgtcgcggttgccgtcggaagcgcggcgtcctcgtctccgccgcaatccgcgtccacgaccgtaatcggcgtggtgtccacggtaagcaccggcgccgtggtgtccacaaccgagaccgcctgggcgtcgctggccgtgttgtcgcacgcgtcggttgccgaccacgtgcgccgaatgaccgactcttgcgggcaatcgcccacttcaacgacgtcggagtaggtcacggggacggccggtccgtcgcacgcgtcgtcggccgtcgcgaagcccgtcacggccgggctgctgtcggtgttgcactcgaccgtcgtgtcgtccggcagcgtgaggtccggacgggtggtgtctcgaacggtgataaactgatcgccgctggcgacgttcccgcaggagtcctccgccatccaggtccgcgtgatgatctcctcgcccccacaggacccggggaaagtcgtgtcagtgtacgtgactgtggcatcgccgcggcagtcggcggtagcgccggcctctccggtgttcgacgggtcggtgctgtcgccgcattcgacggttacgtcgccgggaacggtgagcatcggagcggatgcgtcctcgagcacggtgacgatctggcaacgtgtcgacacgttgccgcaagcgtcggtcgcagtccactcacggacgatcatcagttcgccggcacaatcgccggtcgttaccgtttcctccagcaccagcgacggattgggatcgcagccgtcgctcaccgtgggatcggccggcggcggaagattctcgcatgggacggtctcgtcgttggggaccccgacgatgtccggcggcgtcgtatcgacaacggtgatgatctggtcgcaactcacgggcggattcacgccgtcatccgccgtccaggttcgcgtgatcgtctcggtggcgccgcagcccggtgcgctgctatcgctcgagctgaccgtagccgggttctggctgcacacgctcggttggcccgtagcgaccgcgctcgtatcgtcgccgcactccacggttgcgtccggcgggcaggtgatgttgagggcgccggtgctggcgggcgtgatgtgggcgatgtagtggccaaggccgaagttgctgaacttggcgagaaaggccacgtcgctgctgttgttgatcgagcggtagtgccccgagcgggcctcgccgctctggaagagcatgaactggctcgagccggggaacccgccgaaggccacgccgagctcggacagggccgtcgtgctgtccgcgatgcgggcgacctcctccgcacacgcgtcgtagaaataaaggcccaggagcgactcgatcccgccgccgtcggccggccggatgcccgagccccagaacgtcatgtgcccgtcatcgttgatcgccgcgctgcgtccttgaaagctggtgatcttggcgccggccggttgccccggcggcgtcacctgcgcgtccatgaccagcgtgatcggcccgcccgacgtgtcccgcgcataaatgccctggttgttcggggtgccgctgttccgaatggcggcatagaagccgagctgtcctgcctcgttgatcggggccatggtgatcgtcgtgaattcggcaccggtaatgtcaccggggacgaccaagccgttgcccaccagcgtgtccacgacgttgacgtggggcaaggacccatcgacgttccccgcgaagaggccgaagcgctggacggtgccgggggccgacagcaacggcaggaacaggtaggttccggcctcgttgatgtcgttgtcgtcaaaacgatccaggtattgcgatgcgggggcggtgggggtcgccttcggggcggtttgaacgcggaaggcgaccgtcgtcggcgccccgcctgtaaccgggacggaaaaagtgcctcggcagcagagggtgggcggcgagcggaggatcgcgccatggaacgccacgatcccagcgttgttaatggcgatctccgggcggatctcccagaacccctcatcaagtgctccgtcgcaggtgagtccgaaggggatgtccgtcgggcagatgtccctcgtgctgtcggccaggcggatgcccgccccgcccgcaacggtggtgccgaagattccgttctggcggtcggccaacgcacaggtcggacccgccacgcagaactgcccccagtagaccacgtctccgaagtcattcacggacgccgcgaagtcggacggccgtttgaaggtgaagatgaagctgatgaattggcttgttgccgggtggcccgggaccgtgtccaacgtatcgacgatgttcacgatcggaccgcctgtcgtcgggacgctgaagaacccggatgcgttggtgaacggcgaaacgagctcgcggaagctggcccaaaacacgacgtcgccggcgttgttgagcagcggggcgtcaaactgcgtgaaacgaaatccgggatgaccgggcaccgggaagttcggggcccccgtgccgtccagcgtcgtatccaccagcacgtccagcggaagcgtcggacgcttcacgtagagaccgaactcaccgccggagttcacactgaatcgcgacgcgcttaacgcccgaaacaccacctcaccgctctcgttgacggccggcggcaacggatccgattcgctccagaacacgaagggctcggggcggcccgggacggtgtcggtcagcgccgcgtcgcggttgaagatgctgttgccgctggtccgcatgaccttctcgatcgtcacggttgcgccgcgcaccggcaggccgcagcacagcacggcaaacagtgccagcttcgacacggccggcatggtcctcgcccacctcggcgtacgacgtacggcgtcccgctgtcgcgatcggggagcgcgcgtttcacaagccgccgacgcgaacaccaccatggtcgagtccgatcctggcgcgatgcccaggactccgcgatttccgctagttgacatgcccaggtctcctcaaggtgcttcgagatcgcggcgcgcaccgtggcgacgctgccagaatccgcgcgcctctcttcaccgtgttcaccaccttacccagcatcacaggccggcacaagactggaaaaggaaaaacatgacagaaagcgggcgtgctcgccgcggccgtgcggttggcttgtcacctaaataggtgacatggcgcggcacctgcgacaaatgggctcgctactacgcacgcgcggcggcggcacgcacctcaagcgggacggtggtcccccggtgactcctcgcggcacggctggcgatcgcacccgtacccattcggactcacgctcgcacgtcggtcgggcatcttcctcgatcgaccgggtccggtggcttgggccgggccttccccgagcgagcggccacggacgaatgtaaggtcgcggactgaggcggtgtgattgatacgcgaacgagccttcgcgttcggcggcgcagatcttcaccggcgggcattgctcggcccaccgccgatcgagcgacgtacagagttgtcgatgcgatccgagccggcgacggtctttgcggtggcttgcccggcggctcatatgtggacgcaacggaacgtgtgacccgtaacatactgcaaaacaataggttatgtcaacaacggcgtaacgcggcgcacgaagctggggctggcccggggggaccggcacgttgttcgaaccacggctgtccccacaggttgaatgacgcctgaccgggacatatcctctcatggagccttggtccggagctaaaggcgggggcaagaccatgaccgacacactgagtgcattacagcagcatcaactggtgatcctgcggcggctgcgtcacggcccgctcacggagttcgagctcgcccacgagattgcggagcactccgcttacaccgacgagcaggtcgccgatcggctggccgattggctcgacggactccgacaagaggggttgatttgggccggcactttgtcgaacgcgtccgagcagcagatcctggcggcggcgcttacggcgcggggccgcaagcttgtcgaatgaggatgtgtgcggcctgcctcggggccccgcgggcgggcccgggtcaccttgccgccacgcgggcgagcgtgtcctgatacgcgttggctagttccgcagcgcgtccctccatgtaactgcccgcgttccatcggtaccccaggccgtccccggccttacgcggaatcagatgcacgtgcaggtgggacacggactgcccggccgccgcgccctgattgacgagcagattgaatccctccgcaccggtcacctcaagcagggcccggccgagccgcggcaacatcgcggcaagccgagcggacgcgtccgccggaaggtcggtcaggttcgcgtaatgctggcggacgaccaccaggatgtggccttcggccagaggtgcaacgtcgaggaagacgaggaaactctcgttctcggagatgacctgggccggcagctcggccgagatgatcctacagaatacgcaattgggatcgcgtgccatcggtccatctccctgggggacacggcggagccccggctacgattcagcgccaccgttctcctcggattcctgtggcttgtcgatcggcgcgttggcggaggccttgtcgtcgtcggttgcggacggtcgatcgcgccgcgccttgccacgccccttcatggccgagatcgccagcgcgtagcgagcgttggcccgccgctgccgcgccgacggttccggcttggccaacgcgccgggcggtgtctcctcgccgacgagttgcagcacggcccgcggggcgctgtcgccgatgcgcggccgtgccagccgtatgatcctggtgtaaccaccggggcgatcctggaagcggggggccagcgtttcgaccagccggtgcgtgacggagtccgccgtaaacgcgagccgtccgcggggttcgccggtccgatgccggcggcccgagggcatacgaagcgtcttggcgcgggctgcgtcggacatgccgtcgtagtccgcctggtgctcggcggggatgacacaacgatccccgagcaggcggtggattcgccgacgggccgacagcgccgcggcgcggtcgttctgcgccgtggcccgccgcacccggacggccagggtaatcagtttttcgcagaacgagcggacgtccttggccttcgggagcgtcgtcgtgatccggccgtgctcgaacagactctgggccaagtgccggcgcaaggacttacggtgttcggatgtccggttcagcttgcgttgatgtattcggtgtctcatgggtgttcctcgagcggacgtgctccgggcgcgggccgcggcgcggacatcctcaatcctccatcgtgaagacctccatcggtccggcacccggggatattgacgggtttccttcggtctcctccgcatcctcgtcggaatcggaatcggcctcgctgcattcggcggcgcttgcgccgggcgacggcgcgatcggcataccgtcctcttcgccgagcttcattcccagcgtcaggcccagctcggaaagtttccgctggacctcgtgcaacgaggtctttccgaaactgcggtagcgcagcaactcggcctcgcccttctgcacgagttcgcggagcgtggagagccgggccgcttccaggcagttactcgcccggaccgagagattcaataccgcgacggacttgtcaagcaattcctcgaccgcggagtccggtcgcccgacggtcgcgcccgtcgacggaagcgaggtgaccatgctcgatccgaggtcgttgtacataacgagcggattgaggtgctttcggaggatcatgccggcctcaaccagcgcgtcctcgggcaacacggttcccttcgtccagatttcgaggatgaggcggtcgtagttcgtgcgctgccccacgcgcatggcctcggtccgataacgaacccggaggacgggtgagaaaatcgagtcgatcgggatgattcccagctcctggtcggggcggcggttgtcgttggcggtggcatacccgcggccggcccgaaccgtcatctcggccttgaatggaacgtcggcggtcagggtcgcaatatgatggtcggggttcgcgacggtgacggcggggtcggtctggatctgccgcgccgtgaccgtcccggccttgtcgcagtccagggtcatggacttggtctcgacgccgtcgatgctgagcacgatgcccttgatgttcaggaggatgtcggtcacatcctcgagcaccccctcgagggtcgtgaactcgtgggacacgccgtcgattttcaccgacgtcaccgcggcgccctccaggctggaaaggaggacccggcgcagcgagttcccgatcgtggttccgaaaccctgctcgaacggctcgatggtgaaacgcccgtacgagtccgtgctgacggcctcgtctcgaatgacgcggctcggtaattccaatcctcgccacctgatgcgcatagagttaacctcccgccaggttgatccggtgcacgacgaggatcacctcgcccgcacgccgcgtaagtccgtgtcacacgccgcgccgatgggacatccgacgatctgccgaacggccggcggcgcccgctaccggctgcacatctcgataatcaactgctcttcgaccggaatctggacgtcctcgcgcgtcggaagggcggccacggcgccctcgagcgtctgcgcatccaacagcagccaaggctggatcgagacgtcgccctcgccaacggtccggcgaatcaggttctggctcttcgccgagggcttgatcgaaatgcgatcgccctgcatcgccaggtaactcggccgattcagccgccggccgtttacgtacacatgtccgtgcgcaatggcctgccgcgcggcgcgccgcgacgagcagaaacccagcttccacaccacgttgtccaggcgccgttcgagcagactgagcagcgcgtcgccggtgttgcccttgctgcgctccgccatgcggaagtagagcatgaactgccgctccagaactccgtaatagcgcttaaccttctgtttttcgcgcaggcgcacaccgtagttggtggccttgcggcggcgccaggcgtgcatgcccggaggctggcttcgccactggcgctccatggcgcatttcgcggtctcgcaccgcgcccctttgagcatcagcttgataccctcgcggcggcacaagcgacataccggtccgatgtatctgcccatgagccctacctgatccctgtttccagtcgcgggcgggcggcgccggttgacaccgaacgcgtcgctttacccgtcacggcaactctcgctcgaggaaagtgacttccttgaagccattcgcaagatcgacgaacttcacccccggcaattgcttcagcgccgaggcggcctgctcccagaaattgagctcgatcgcccatttctttttcgcgcaccgctccagcgtcggaacgtactcttgatccccggcgacgagcgcgacggtcccgggccccgggttgtcttccaatgtgtcccggattgcgttggtcatttcggcgtccacgcgcttctctttgcccgtgtagaagctccgatcgaagattctcggttcgatgcccaacgacttcagacggttccacaacgcatcgttcggcggcggacgggaacccacgaggacggcctcctccagcgtgcggccttggcgaacgtactccaacaagccgccgtagttgatccggaagcggagaacgagcgggtcgtcgtatcggaacgcttcgcgcgcggcccgctggccctcgatgaaaacgttcgagttatcgatgaaaagatgtaagccgttcaccgtaagcctctcaccccgtcgctacacccgccgccgcttcttcggacggcagccgttgtgcggcagcggcgtcacgtcctcgatggaatggatccggagcccggacgattgcagcgcggtaatggcggcgtcgcgcccgcttccgggtcccttcacccgcacctccacctcctgtagaccgaagcgccgcgcggcgtgggaggcctgctccaccgcacgctgggcggcgaacggcgtgctctttcgagttcccttgaagccgacggtgccggccgaggccttgcacaggacgtccccgttcatgtccgtgatggtgaccagcgtgttgttgaacgaggccttgatgaacgctatgccccgcgacacactgcgccgctgcttccgcttgctgccggttcgcttcgccaagtcgcctactccttcaccgacgcgccgatcagcgcatctccttcacgctcttcttgcccgccaccgtcttcctcggtcccttccgggtccgggcgttggtccgcgtgcgctgcccgcgcacgggcagatgcgaccgatgccgctgcccccggtagcagcggatgtctttcaggcgggcgatgttcgattggacgatccgccgcagttgcccctcgacctggtagttccggtcgatgacggagttgatccgggtgacctcctcctccgtcaggtccttggccttgacgcccacgtcgatctgcgcctctttcagcacgtccaccgcgagcttcgggccgatcccgtacacatagcgcagggcatacatcatccgcttgtcgttggggatgtccacaccggccacacgcggcatcgttccgcctccttaaccctggcgctgcttgtgccgcgggttcgtgcaaatcacccgcaccacgcccttgcgcttcacgatcttgcagttctcgcaaatccgccgaacactcgcacgcaccttcatgatcgtcgttcctgtttccggtcgccgccaccaaaagcggtcatcgcccgttcgtcagcacatccgcgccgtcctccgagaccgccacggtgtgctcgaaatgggcagcgcacttccgatccttcgtgaccaccacccatcggtcggcgtcacggtactcgacggccggggtgccgaggttcaccatcggctccaccgccagcaccataccgggcagcaactcgaagtcggccagtttctgccggtcggcccagtaattgggcaccttcggttcctcgtgcatgtcccggccgatgccgtggccgacaaagtcccgcaccacaaacaggccgtggccttccaccaccgcctgaacctcgcgagccacctggctccagagccggcccggctccatcaactcgatcgcgcggtcgagggcctgccgcgtcaccgtcatcagccggcgcgaggcttccgacacctcgccgatggcgagggtgacggccgagtcgccgcaatagccattgagcttcacgccgcagtcgacgctgagcacgtcgccgggggtgagcggccggtcgttcgggatcccgtgaaccagctcctcgttgacgctggtgcacagggcggccgggaacgggaacttcgcctgcgggttctcgacacccttgaacagcgcgatgcccccggcgtcggcgatcatcttctcggcgaccgcgttgagctgctgcgtggtcgccccgggcaccgcaagctcccgcattcgcccgagaacgccatgcaccacacgcccggcggcccgcatcagctcgatctcccgctcgttcttgagaatgacgccccggggctgcctcacacccgtcgtcctacgatgccgatccagctctttcatctcctatagaccgtataaccaagtccgttcggggcaagccgggccgccgccgggtcaggagcgcgagcccttgatcggcccctccgtacccagaaaaccgcggtaattccgcataatcaggttcgcctcgatccgctgcaccaggtccaaagtcacactgaccacgatgagcagcccggtcccacccagaaacgcggacaccccgaaggggatcttgagcgactcggcgacgatggtcgggatgatcgcaatgatcgcgaggaagccggcgccgacgtacgtgatccgtcccatgacccgctcgaggtggtcggccgtgcgtttgccggggcgcaggccggggatgaagctcccgtagtcccgcaggttgttcgccatttccttgggccggaactgcaccgtggtccagaagtacgcgaagaagtagatcgccacgatgtagaacacgatgtagaggtactcgcccatgcggaacgactcattccagaaccgccagaatgagttgggccaggccgtcgccaaggcggtgaacaccagccccgggaagatcagcatcgagctggcgaagatgatcggcatcacgccgccgtggttgacgcggaggggcaggtagtgccgctggccgccgtacacccggcgtccgcgggtctgcttggcctgctggatcgggatgcgccgctgggcctgggtgatcaggatcgctccggccacgacgccgcagaacatgatggcgagaaagagcaacttcgggaggtccatctgccccgcctgggccacccccttgatgctgaggttctggtacacccagatgcccgcgtcgggcattcgcgccacgatgccggccatgatgatgagcgagataccgttgccgataccgtattcgtcgacctgctcgccgagccacatcaggaacaccgtcccggtggtcaggatgagcagggacatgaccatgtacgagaacgacatgccgatccatgagcccgtgtactgggggaacaggtagccggaactggcgaggtaccgcatccagacgacggcgttgataatgcacaggccgacggtcgcgtagcgggtgtattcctggatcttgcggcggccgctctcaccctcctgctggagcttctccagcgacggaacgaccgtcacgagaagctggaagatgatggacgccgagatgtacggcatgatgcccaaaccgaagatcgtgctctgactcaggttcccgccggtgaagatctggaaatactgaacgaggtccccgaggccgccgcccccggtcggcatgccgcgggccatctcctcctgattcacgccgggcacgggcacaccgaaaccgagccggtagatgacgagcatccccagcgtgaagagcaccttgttgcggagctcgggaatcttgaaaacgttcagtaacgtcgcaaacatctgctatcgcgtcgccttttgtcggtccaagggtgtacgccggaccaaacctgtccgaccggtcctcgacattccaatgactctgcgcccggcgcgctccatctcaggctcccacgcggacggtgccgcccgcggcctcgatcttcgctaccgccgcctgactgaacttcgcggcgaccacgttgagcttcttggtcagcgcaccggcggcgaggaccttgacgggccgccgtacgtcgcggatgagcccggactccttcaaccgctccggcgtgacctcggtaccggcgtcgtagttgcgctccagcgacgcgacgttgaccacgtggtaccgcgtcgtgaagcggacgttgctgaaaccgcgcttgggtacccggcggaacaggggcatctgcccgccttcctggagcacccggccgctccagccggcacgctgcccggcgcctttgtggccgcgcccgctcgtcttcccgagcccgctgccgcggccccgtcccacgcgcgtacgccgcttgtcggcgccggccagcttcgtgatctggttgaggttcatgatcgttgccccgcctgctagctcgccagcgcgaccccccgcaggcgttcgacatcggcccgcgagatcaatgacgtcaagccctcgagcgtggcccgcacgaggttcttggcgctgttggatccatagctcttggtgagcacgtcatgcacgccggcgagttccagcacgggccggacgctcgccccggcaatgacgccggtgcccgggctggccggcaccatgaccaccttgctcgccccgtatcggccaatgatccggtgcggcagggtgcctccgaccagcttgatcgggatcatggactcggtcgcgatcttcttgcccttctccacggccgacgggacctcaatcgactttccatagcccacgccgactcgtccccgtcgatcgccgacgacgaccagtgccccgaaggagaaccggcgcccgccacggacgaccgtggcgcaacggtagatcttgacgacgacgtcctcgagcggtcggccttccgtctgcgatgctgcttccaccgttgtcatcgtgctgtcggttcctccgaaggagcctagaacttcatcccgctttcgcggatcgcctcggccagggccttgacccgcccatgataccggtacccgttccggtcgaagcagacggactcgacgttcttggatttcgcccgctcggcgagcgccgcgccgacgaccttcgccgcggccacgttcccgccgtagctcacctgaacccgaaggtccttgtcgcgtgtgctggcctcgcacagggtcacaccgcgatcatcgtcgatgatctgcgcgtagatgttctggttgctccggaaaacggtcaggcgcggacgctccgccgtcccccggatgcgcttgcgaaggccgcgtttgcggcgatcgcggcgctcgaccttgattcgactggcgttcatcgcttcgttatgtcctcactcgatcgacggcggatcgcgccgggctatccggcccccgccagggccttgccctgcttgcgccgcacgacttcgccttcgtaccggatccccttgcctttgtagggttcggtcttgcgcagggcccggatttcggccgcgaactgaccgacctgctgccggtcgtgccccttgaccaggagctgggcgggctcgttctcgccgcgggccgcctcgcgctcgatcacgacttcgaggcccggcggcaccggaatctcgaactgggagcccacgccccgccgccgcccggagaatccgacgttcaggtggagcgtccggccggccagcttgcagttgtaaccggttccgtgaatctggagccgccgctcgaagcccacggccgcaccgcgaaccatattggcgataagcgcccgcgtcagtccgtgattcgcccggctctgcttgctgttatccgtgcgcgtgacgcgcaccagcttcgcggcgtcgtccatggcgaccgccgccgtcgccgggaactgccaggaggagtcgcccttgggtccggacacggagacctcgcggccgctcaccttgacggtcactgtggccggaaccggaatcgccttggcaccaacgcgtgacatacctggagttcctcgcctacctattccaccgtgcagaccagttcaccaccgacccgctgctcgcggcactcgcggtcgctcaacacgcctcgcgacgtggacaccacggcgatacccaacccgtcgagcacgcggggcagggcgccggacttcttgtagagccttcgcccgggcctggacgcgcggctcaggctgtggaggacgacctcgccgcgaggcccgtacttgagctcgatccgcaggacgccctgcttcccgtcttcgatgacgtcgtagtcccggatgtatccctcgtcacgcagcacgcgggcgatcccgaccttcatcttcgacgacgggatcttcacgtggcggtggcgcacgcgggcggcgttgcggattcgcgtcaacatgtcggctatcggatcagaccacatggtgttctaccagctcgcctttcggactccgggaatcaaaccgccgtgcgccagcctccggaagcatatccggcagacgcggaacttccgatatacggcccgacaacggccgcagagctcacagcgccgcaccacgcgcgacttgaacttcggcttacgcttcgccttgacaatccacgcggtcgtcgccatcagttactctgctcctcggtgcgccgcagcggcagccccagcccggcgagaagcgccttggcgtgggcatcgtccctggccgtcgtgacgaaagtgatgttcatccccaggttgtaggtgatcttgcccaggtcgatttcggcgaagatcgactgatccgggatccccatcgaataattgccccgcccgtcgaagctcttggggttgagcccgcgaaagtcgcgcaggcggggcatcgcggcgttgaacagccgatccacgaactcgtacatccgccgcccccgcagcgtcacccgacacccgacctcgtagtcgcgacgcagcttgaaattggagatggcggtcttggcccgccgaacctgcggcttctgcccggtaatccgcgtcaggtcctccgtcgccgcgggcaggcggttcttgtcctgtgtgggtgatccggtccccatcgacaccaccaccttcgtcaggcgcggcaccgccatcgggttcgcgatccccagctcttctttcagcgccggagcgacttccgtcttgtaggtttctagcaaccgagccataggatgttccgcctcattcgtccctatttcgccgcccggtccgcgcggctgagcgtgtgcagcgtcgttccggatcgggtcacacgccgtttgacgaccgcccttgcggccttgcgatccatctcgaaatggacccgctggctcttgcccgcagcactgtcgtacggcaaaacgttcgacaggtggatcggggcctccttctggattcgacccccctgggggttacgctgcgtccggcgcacgtggcgatagaccaggttcaccccctcgaccaccacccgctgtttcaccgggtcgacgcgcagcaccttgccccgcgccccccggtgatcgccggcgatcacttccaccacgtcgttcttgcgaatgtgcgccgccatgagccctcaaaccacctcttccgccagggacacgatcttcatgaaattccgctcccgcaactcgcgggcgacggcgccgaagatgcgcgtgccgcgcggctcgttcttctcgtcaaggagcacgacggcgttgcgatcgaaacgtacgtagctcccgtcgggccggcgggtcggcgcagtgacccgaacgaccaccgccttggccttgcgccttttggaccggtccttgcggtccgaccctcccgagaaatcgctgttgggcagggccttcttcaccgtcaccaggacgatgtcgcccagacccgcggacttcagccgcggcttgccgcggcgtgccgtactccccttgtacacgttgatgaccatcgcctgcttcgcgccggtgttgtccgccacgtcgaccatggtctgtaattgaatcatcgccagctcccgccgcgctcagcccgccatcatcgccgcaggtcgcaccacccgcagcagccgccagcacttcgtcttcgagattcggcggcaggccatcaactcgaccaggtccccgaccttcgcctcgccgccctcgtcatgggcatgcaacgtggtcgaccgccggtagtacttgccgtacttcggatgccggacctggtactcgtgctgaacgtggatggtcttctcacccttgtccgacacgacaacacccaagagcgtgtcgcgccggccgcgctgatcctgcgaacccgtcggcgattccactgtatccatcattcccgttcagctcgttgtggggcgcgtgcggcgtctctaccgccgggcgcccgttgcttccaagtgccgctgcgtctcctcgatgcccgtttcgccgcgctccctcaggatcgtcaggatcctggcgatgtcccgcttcgtggcctcgagctgatgcggattctcgagtttctccgtcaccgcctgagcacgcaggtcgaacaggtgccggcggaggcgctcgagctccagatgcagctcggcggtcttcatttctcgcatctcactcgcccgcatagcggctcctttgggacgcgctggggtctaaaggccgtgccggcgcttcacgaaacgacaccgaaacggcatcttcgaggccacccgcaccatggcgttgcgggccacgtcctcctcgacaccgcccacctcgaacagcaccgttccctcccgcacgcacgccacccagaactcgggatcgcccttgcccttccccatccgcgtctccagcggcttcgaggaaaccggcttgtgcgggaagatccgcacgaagacccggccctcgcgatggaggtaatgcgtcgcggcgacccggcccgcctcgatctgccgggccgtaatccagcccttgcccaggcactgaagaccgtattcgccgaacgccaccgtgttgcccttctgtgccgtgccacggatcttgccgcgctggctcttgcgccatttcactcgcttcggcatcatcgccatggcgtcgactccgtcatcaccgcggaacgggtttcactcgccgtcttaaccacgcttccctcgccggtaccgcggctgcggcgccaggtcgctcaggtccggctcctcgccgtacttgccgtgatagagccagaccttcacgccgatggtgccgtacttggtcttgcaggtcgcgaccccgtagtccacgtgcgcctggagcgtgtgcagggggatcgagccgcgatgctgggtctcgcgccgggccatctccgatccgccgaggcggcccttgcacatgatcttgatgcccttggcgccggcggtcatcgccgcctcgacccgcgacttcatcacccggcggaacgcggcccgctttttgagctgctcgccgatcgattccgcgatcaacttggcgtccaggtccgggtgcttgatctccacgatgttcaggctgatcttgcgatcgatcaggtcctcgagggcctccttgagcttctcgacctctgcgcccttggccccgatgaccagaccggggcgcgccgtgtgcaggtagaccttgacttcgttccgcgtgcgctcgatgtcgaccttcgccaccgcggcgtaggggggctggcggttcagcttgtcgtccacgtattcacggatcttctgatcttcgatcaggaactccgcgaacgccgccttcggcgcgaaccagcgcgaacgccaatcctcggtgatgccgatcctgaagcccgtcgggtttaccttctgacccacgaatcactcctgtgccgcgccggacgaaacggcggcacgctcgtcacgactcggccacggtcacacataggtggctcgtccgtttggcgatgggatgagcgcgaccgcggtccttcggccgccaccgctggaagtacgggccgccgtccacgcgggcctctttcacgaccagtcgcggcatgttcgcctcctgctcgtccgcgttgaccatcgccgacttcagcacggcctcgatgaaccgggccggccgtcgggcgttgaagcgcagttgttccagcgcctcgctgcacgacttcccgcggataaggtccatcaccagccgcgcctttcgcggcgcgatgcgtgcgaaccgatgcttcgccgtccacaatcgctcgtcgctcactgccctgcccagccgatcaacgagcccaggctcgttgtcgccttaaaaaacgaaacgccgggctctctgacccagcgctgaacctacgccttcttcccgccgtgcccgcggaacattctggtcgggctgaactcaccgagtttgtgcccgaccatgtcttccgtcacgtagaccggatgaaacaccttgccgttgtgcacctcgaagcgatgccccacaaactccggcacgatggtgcagcgccgggcccaggtacggatcaccatgcccgtaccggcggccttcgtgttcatgactttgtggaagagcttttcgtccacaaacgggcctttcttctgggaacgtgccatgtccttcggacggctccttggtcttatttcttgggcaccggaatctgcccgtatcgcctgctgcgtcgacgccggatgatccgccggttcgaaaccttgcgccggttgcgggtgcgtccgcccttggccagcttaccccatttgctgcacgggtggcgccccccgccgcttcggccctcgccgccgccgagcgggtgtgacacgggattctgtgccgtgccgcgaacgtgcggccggcggccgcgatgccgcgtgcggcccgccttgccccaccggatgttctgatgctcgacattgccgagctgcccgatcgtcgcccggcactcgacacgcacctcgcgcatttcgccggagggcagcgtgatgatcgcccacgactcgttccgtgaaagcaaccgggcgtacgagccggcactgcggcagatcttgccgccctgaccgatgtgcaactcgatgttgtgcacgtccatacccggcgggatccgcttcaggggcatggcgttgccgaccttcggctcgacacccaccccgctctccacgaccgcgccgaccttcaggcccgcgggggccagaatgtatcgctggtcaccgtcctggtacttgatcagggcgatgtgcgcggaacggttgggatcgtattggatcgcttcgaccgttcccgtaatcccgtccttgtttcgcttgaagtcgatccgtcggtagagccgcttggacccgccgccgcgatggcgggaggtgatccacccgtggtggttgcgcccgccgtgtttgttgagccgctcgcacagggccttgaccggccggccgtgcggctgcgtcagctcggcatagtcgttgaccgacgacgcccggcgtcccgcggaggttggcctgtatttctttacgcccatctgcttgccacgctgctctagaacagatcgatatggtggtcagggtgcaggaccaccacggctttcttccaatccgccgttttcccgatcttgaaccgcacccggcgctgtttacccttgcggttcgcggtgcggaccgactgtactttcacgcggtagatcgtctcgatcgcctgccggatctgcggcttggtcgcccgggcgtggacctcgaacgtataggacccgccgcgggccgcccggctgccggtcgcgtcgtgcgactgctgtgactgatgcgtgcccttctcggtcaccagggggcgtttgacgatgttgtagatgtccatgccgcaacccccggtcgcctacgcgcccgctcttttcgacgcgcctcgggcggcgactttctcgaacgccggccgcgtgaagatcagtttgtttcgtcgtagaacctcgtacgcgttgaggtcgtccacgagccgcacttcggtcttgggcacgttgcgcccgctgagatacacattgcgatcccgctcatgcagggccagaacgcaaccgcgctccgcgcccaacgccaccagcatggacgcgaagcgtttggtcttgggtgcgtcgaactgcacgtcctggagcaccatcgcgtcagccgactggatcttcgccaggatcgctccggccagggcgagccggcgcattttcttcgggagctccttcgtcgcccgcgggcctcgtttcccgaacgcccggccgccgccgcgccgcacgggcgtgcggatcatcccggcacgggcgttgccggtgcccttctggcgatacagcttgcgggtggaaccctcgacgtccgaacgccgcttggttcgcgcgctgcgttgacgctggtggtccaggtaggcgacgaccgcctgcttgatcagtcgcggacggacgcgtatccccagggcggccggatcgatctcgatcgtcccggtctgcttgccgtccatgtcgaatacgggtaccgccaacatcctcgctagcccttcttcgccttgctcttcttcgaaccacggacgaacactgcgcccccgtcgggccccggcacactgccgcgtatgagcagcagatcgtgctccggatcgatcctgaggagctcgaccgcccgctgcgtgcgtcggacgttgccgagctggccgctcatccgtttgcccttcttgatgccccgcccggtcgctccgggggcgttggccccgatcgatccgggggaccggtgtttccgttcggttccgtgcgacgcgcccatgccgccgaagccgtgccgtttcatgacacctgcgaagcccttgcccttcgtgacgccggtcacgtccacgagccccttgaccgatgcggcgaacaactccacggtcagcacatcgccggccgacacgtcggtcggctcgttgagccggacctcgcgcacgacccgcttgggacccgagccgaccttggcagcgtgcccgatcatcggcttggtgctgcggtgcggcttgacgtcatcgtaaccgagctgcacggcgtcgtatccgtccgactccttggtcttcacctggagcacgacacacggaccgcacttcaccacggtcacgggctccgcgcggccgccatccgcgaggatgcgcgtcatgccgactttggtacccagcaatgcagggatcatgctcggaaacatcccgttgcgacgaccgcacgcggcgaaactaagtcctgatcttcacgaacacgccggccggaacctgaattcggttgatggcctcgaccgtccgcgccgtcggctccgcgatgtcgatgatgcgcttgtgcgtccgcatctcgaactgctcgcgcgatttcttgtcgatgtgcggactgcgcaacaccgtgtatcgttcaatccgcgtcggtaagggaatcggcccgtgcaccttcgccccggtccgcttggcctggtcgacgatctcccgcgcggacgcgtccagcgccccggaatcgtaggcttccatgcgaatacggatcttcgtctgactggccatgccgcgaccacccatacccaaaacccgccggtagacgcccggcgaccaaaaaaaacgcagaccggtaagaatacctgccgcggcaagcctgtcaactgcccaggaggacgccttttttctgttttttttttcggcgtgggaggcagccggtcccgcccctaaccaaccagggccttcatggccgccgcccccaccggggcgtagtgggacggcgtcatcgtcgatgtggcccggccctgggtgaggctccggagcttcgtgacatacccgaacatctgtgccaggggcacgtcggccgctattacacggttcgggccgcgcaggaccgtctctcgaaccgacgctttccgcgcgttcaggtcgccgatgatcgcgccgaggtactcctccggggtgaccacctcgacggccataatcggctccagtaggacgggtgcggccgccttcatggcctcgtagaaggcgtttcgaccagcgttctcgaaggccagctctgagctctcagcatcgtgctgctcgccatcgacgatggtcgccttccagtcgatcaccggatacccgcccagaattccgctctgggacgcgtcccgcacgccgatcttgatggcctcgatgaacgcgggagcgagcccgtcacttgcgaccaacgagatgacctcgaagccctggcggcccttcccggcgccacgagggcgaggttcgaggcgaagtcggcacatcgcgaaatgcgcccgcccgccaacctgccgaatgaaccgcccgtcgctctcgccgacgccactgaccgtttcgcggtatgacacccggggcttgctgacaacgacctcgatattcatgtcagattttagtcgttgcatcataacttctaaatgaagttctcccatcccggataccagagtctgtcctgtttccgggttggcggcgacagcgagagtggggtcttgccgctgtagcgctgcgagggcctccatcagcctgtcgcggtctctcgaggcgcgcggctcgacggaaacactgatcacggtttccgggaactcgatcgactcgagcaccaccgggcatcggggatcacagagtgtatggccggtcagcgtctttcgaggcccgacgatcgccacgatgtccccggcatgggcctggtcgagctggtcgcgacgtttcgcgaacatccggaaaatacggctgacgttctctttttcacccgtcgtcgtattgagtaaacgcgagttggacttgagcgtgccggcatagaggcggacgaaggtcaggtccacgggcttgtcggccagaaccttgaacaccagcccgacgaagggcgcgtctaccttacaggggatctcgatcttctcgtcgggcttgtgggcgtcttccccggctacgggagggacctcggtcggagccgggaggaaatcgcagaccgcgtcgagcaggcgttggacgccgacgaaccgcagcgaactgccgcacaggacgggcacaagctcacgttgcagggtcgcgttgcgtatggcggtcacgacctcatcgcgggcgacgggccggtcatggacgtatttgtccatcagtgcatcggagaactccgccgcggtttcgagcagctcgcgtcgggccgacaccgcggccggccggagctcggcgggaatctcgacgatctggaacgtggagcccaacgcctccgattcgtagtagaccgctttcatgtccagaaggtcgatcagcccgacgaaatcgccaccggccccgatcggaatctggagcgcgaccgggcgggcgtggaggcgctcccgcagcgaagccacactgtgctcgaagtcggcgccgacccggtccatcttgttgatgaagcagatgcgcgggacccggtacttatcggcctgatgccagacggtctcggactgggcctcgacgccttcacgggcatcgaacaatacgaccagcccgtcgaggacgcggagcgagcgctccacctcggccgtgaaatccacatgcccgggcgtgtcgatcaagttgatcgtgtgctctttccaggggaaggtcaccgccgcggagtagatggtgatgccgcgcctctgctcctgctcgtcgaagtcggtgatcgtggtgccgtcgtctacgtcacccatgcggtgtgtgcggcgggcgtagtagagcacgcgttcggtggtcgtggtcttgccggcgtcgatgtgcgcggcaatgccgatgttgcggatcttggataggtcggcggacatcgcgcttgttggactccggccggcgccgaggccccggcgggatcgctgttcaggtcgtaaacacgaacaagcccgccccacgggctgggcgggcttgggaaaaactcgaggcgaggttgttaccaggcaaagtgggcgaaggccttgttggcgtcggccatgcggtgcacgttctccttcgtcgtaaatgccgtaccctcggccttggacgcgtccacgatctcctgggccaggcgctcgcggagcggccgccccttcttgccccgcgccgcctcgcggatccaccggaacgcgagcgactgctgccgcttgttgttgaccggcatgggcacctggtagttgctgccgccgacgcgcttcgagcggacctcgacgttgggcttgcagttgctcaccgcccgctcgaagacctcgagcggcgaatggtccttcacgcgcttcgccacgatatccatcgccccgtagaacgcccgctcgcacgccgacttcttgccgttggtcatcaacgtgttgatgaatttcgacacgaggcggctgttgtagcggacgtcgggcttcagttgctcaggcgaagctgtccaacgcttgtatgccatcgatcgtcaactccaggacacacccccgacaatccagcatgatacgcccggcccacccgggattcaatttctcgggccccgacccgacacctgcccaccgcccgcggggccgagcccgcggatcacacgcaccagcgacgccgccaatagcacctcgaccgccgctttcgggaggaacggaatcaccccggtccagaccgccgcggcgacgtcgccaccgagcatcggcaggcgccagaccatcccaaaggcgaacaccgcgcccatgccgcacgcccccgctaccaacagccgtgcatacgcggacgggcgcggcccgcgcaacgtcgagaccagccacgccgcagccacaaaaccgacgaggtacccggccgtcggaccggcgaatccggtggaactcggtgagaacaccgggagtccgcaggccccgcacgccaggtacagcagcgacgccgcgaccgcccggcccggactgaggaagtaccccgtcaggagcaccgcaagggcctggagggtcatcggcacgtcggtccccggcaccggcacgcgtacctgggccgcgagcgagatcgccagcgtccagccgctgacgaccatgaggccggcgaccgccgtggcgcccgatcggctcgtgcccggcatgaccggcgccgtcgtcgcgggattctgtatggttcggctcatgcagacatccatctcgggccgtttcggccccgaagtcgcgttgtcatttgcgtcgcttgacgccgtacttacttcgactccggtttcgggcgcggccttccttgtcaccctcgacacctgcggcgtccagtgcgccgcggatgatgtggtatcgaacgccgggaaggtctcgcactctgccgccgcggacgagcacgatagagtgttcctgtaggttgtggtcgatgccgggtatatacgcggtgacctcccggccgttggtcagccgcacacgggcgaccttgcggagcgccgagttcggcttcttgggcgtctgcgtcttgacaatgaggcagacggcccgccgctgcggacattgctcgaggtcacgcaccttggacttctttgtcaccttggtccgcggcttacgaatcagttggttgattgtgggcattgatgtactcgtcttcgtacggtctgccgcgctggatcacgtcagcgccggcgcgggtcattcctcctgtcggacgccgtggccgatctcaacgtcgtgctccgactcctcggtggtttccacgtcggtggtggccacgctttcctccgtcgccgttgctatgctgccgaatctgctcccgaaggagaacccggcgccggcaccgaaccccgccccggccccgatggtcaactcggccgggatgtccggcaggatcgggatcggctcgccgagctgcttcaccctcagttgctggtagcggcggaagccggacccggccgggatcagatggcccagtatgacgttttccttcaggccccgcaagcgatcgacccagccgcccaacgcggcctccgtgaggaccttggtggtttcctggaaggaggccgaggagatgaaggactcactggaaaggctggccttggtgatgccgagcagcaaggttgttgcggtggcgggcttgggcttcttgcccttggcgggctcacctccgttggcctcggtttcggcgttgatctcggtcagctcggtcttgaggacgaccgactcggcgttgagtttggtgtctccggggttggagatgatcacgcttttggcgagccgggcgttctcgtactggaacctgaacttgtcgaccacctcgccggggaggaacgtggagtcaccggggtgctcgaccttcaccttccgcagcatctgggagatgatgatttcgaggtgtttgtcgttgatggtgacgttctggctccggtagacggcctggacctctgcgaggagatactgctcgagcgcctcgacgcccttgatgcgcagaatgtcgtgcgggatgagcggtccctcgacgagcgggtcaccggcctcgacgccgtcgccggcgtgtaccaggaggtgcttgtcctggggcacgtgatgctcgcgctcgaggccgctctcgctggcgacgacgatcgtcatcttgccccgccgtttgtcggcgcggatctcgatcttgcccgaaagctcggccatgaccgccggttccttgggcttgcgggcctcgaagatctcggtgacacgcggcagaccgccggtgatgtcctgggtgccccccatggcccgcggctgccgcgccagctccatgcccgggaccaactcctgcccttcggcgacctcgatgcgggccttcgccgggaggtagtggtagtcgagtacgtttccgtccttgtcctcgatgacgatctgcgggtgcttttcgcccttgtgttcgatgacgacgaacttggccttgccgccttcatgctcgagccggacggtctcgccgtcggtcacgtcctggaagcgggagaatccgcccacctccgccagaatcggcgtcatgtgcggatcccactcacagagaatgtcaccgcgtgacaccttctggtcgtccttgaccttgagtaccgcaccgtaggggaccttgtcacgggtcagctcccgtcccttgtcgtcctggacgatgatctcgccgttgcgcttgaggaccaccgtgcgcagcttcccatccggacccgggacgtcgacagggttgaggtcacggtacttgacgacgccgcgctgggtgaccttgagcttgctttccatcgcggccttctgggccacgccgccggtgtggaaggtccgcatggtgagctgcgttccgggttccccgatcgattgggcgccgatgatgccgaccgccatcccttcctcgacgagtcggccggtggacatgtccattccgtagcaactggcgcagacgccccgcgcggcctcgcaggtcatcgggctccgcacgcggatcttgtccagcccgagatcctcgatccgcgtggctatgtccttggtgatgagctggttctcggcgacgatgggttggtcggtcaccgggttgcggatgtcgtcgcgggcgacgcgcccgacgatgctttcccgcaggggaatgtccacctcttcgcccttgtagatcgcggccttggtgacgccggcgatcgtcccgcaatcgtgcaggttgatgatgacgttctgcgcgacgtcagccagtttgcgggtgaggtagccggagtcggcggtcttgagggcggtgtccgccagcccctttcgggccccgtgagtggaactgaagtattcgaggacggacagcccctcgcggaagttggccttgatcggcgtctcgatgatctccccggacggcttggccatcagagcccgcatgccggcaagctggcggatctgatcgacgctgccacgcgcccccgactgggtcatcagatagatcgggttcaggtacgcggatgcgcccgcgtcgtccgggtcggcataggtgttgtcggccgatcggaagtcggtgcgcagctcccccatcatggcctgggtcacctgctcgcgggcatggatccagacgtcgatgatctggttgtagcgttcgaggcgggtcagcataccctcctggaacgccttttcgatcttgtcgacggcgagctgggcggtgtcgatgatcttctgcttggccttgggaatccgcatgtcggtcacgccgaacgacaggccggccagcgtgctctgcttgaaaccgatgtccttgatctgatcgagcagggcgatggtggccgcccgcccgagcatctcataacagtcggccacgacccgcaccagccccttctgcgacaacgggcagttgtaaaacggcatctcctgcggcaacccgtcgttgaagatcaggcggccgaccgtggtcccgatgcgccggttggccgccaccgcggcgggcgcggacttgaccgtcgccacgacctgctcgcggtcgatgcggacgctgatcttgtcgtggatgccgacgcgccccatgtcacgggccatcatcgcctcgaaggcgttggcgaaccgcggcacgtccttttcctcgaccgcctggctgacgtggtcggtggtcaggtagaagatgcccagcaccatgtcctgcgtgggggacatgatcgggctgccgttggcggggctgaagatgttgttggtggccatcatcaggatgtgggcctcgacctgcgcctcgatcgacagcggcaggtgtacggccatctggtccccgtcgaagtcggcgttgaagcccttgcacaccagcgggtggatcttgatcgcgttgccctcgaccagcaccggctcgaaggcctggatgcccatccggtgaagcgtcggcgcgcggttgagcagcaccggatgctggtagatcacttcctcgagaatgtcccagatcgcctggtcccgacgctccaacatcttcttcgccgacttgatcgtgtccgccagcccccgctccttcagcttgcggatgatgaagggctgatagagctccagggcgatcttcttgggaagcccgcactggtgcagcttcagctccgggccaacgacgaccaccgaacgcgcggagtagtccacgcgcttgccaagcaggttctcgcggaagcggccctgcttgcccttgatcatgtcggtgagggacttgagcggccggttgctggacccgagcaccggacggcggcagcggccgttgtcgaacaaagcgtcgacggcctgctggagcatccgcttttcattctggatgatgacttccggcgcgttgagatcgaccagcttcttcagccggctgttgcggttgatgatccggcggtacaggtcgttgaggtcactggtggcgaagttgccgctgtccaggagcaccagcgggcgcaggtctggcggaatgaccgggatcacgtcgagaaccatccaggtcggatcgttgggcgactgccgcagggcctcgacgaccttgagccgcttggcgaactccttctcgcgctgcttgcttccggtcttggccagcccctcgcggatctcgcccgaaagctgggcgaggtccagccggctcaggagctccttgacggcctcggcccccatcatcgcggtgaagcccttgccgtagttctcgaccgcggaccggaactcctcctcggtcaagagctgcttggccttcagcggcgtgtccccgggctcgaccaccacgtaatcctggaagtaaaccaccttctccaggtcggcggtcttcatctcgaggagggcgcccagcctcgacggcatcgccttgaagaaccagatgtgcaccaccggtgcggcgaggttgatgtgccccatgcgcttgcggcgaacgcgcgaatgagtcaccttcacgccgcagcgatcgcagatgatgcccttgtgcttggtgcccttgaacttgccgcatgcgcattcccagtcccgctccggcccgaaaatgcgctcgcagaacaagccgtccttctccggccggtacgtgcggtagttgatcgtctcgggtttcttgacttcgccgaacgaccagcttcggatgtcgttcggggaggccagggaaatgtgcacacggctgtaatcgttcacgcgatcgtaaatactctcgagcatcagttctgattctccctcatgccgaaagagcgaaaaaaggtccgtatgcgttcacccctgccgaccgggcccgcggttcatcccgcgttgctcgatgcagccgcagcgccggccggcagcgccgcccccgtgtcgcgttccatggcggttacgccccggagcttccggaaccccagttcctcgcagaagtcctcttccgtaccgtaggccagggcgtcgatccgctcgaccccgtaatcggtcagggcggcgatcacccgcgccgccatctcccgggctatcccggccgagtcgtgctcgatccgcccgtcggtccgcgtgacgcacgccgggccttgataggccgggtccagcttgcattccgccagacgcccccaaagcccgtcggtcacaccgcgggccagcccgatcagttcaccgtcgcgccgcgcggtgacgaagcagaacgtgttgttcaccatccgctggagtttctccagcgaatgcgtggtcggatggttctgccgccggtagaacacgagcagctcctgtggatcgggcttggtcatggtctcgaattcgatgtcatcgagcatcggtcacctatcctccctggcgaggcccgccggactccgacccggcctcagcgccacacgtcgcaacgggcgccaaaggcccgccgcgggcgtccgccccgcgaaccgcatcagcccacacgccgcttctccaactggatgttcaggcacagaccgcggatctcgttgcaaaggacgtcgaacgagaccggcgtgccggcttccagcgtgttcttgcccttgaccatggtctcgtaaatcttggtccgcccctccacgtcgtcgctcttgacggttaacagctcttgcaggatgtgcgcagcgccataggcttccagaccccagacttccatctcgccgaagcgctgaccgccggtgcgggccttcccgccgagcggctgctgcgtgatcaggctgtacgggccggtcgcccgggcatggatcttgtcatccaccaggtggtgcagcttgagcatgtagatgtaacccacggtcaccggctgatcgaggtactcgccggtccgcccgtcgcggagccgaaccttgccgccgggcgggagggtgacaaaccgtgaatcctccttggcggctgctcggaccaggtccatgttgccgccgcgctgcccgcaaacgtggttggcttccgccagggcggcatgaatctcctcctccgtcgcgccgtcgaacaccggggtgacggcctggaacccgcacaccttggccgcccagcccaggtgcgtctcgaggatctgccccacgttcattcgcgacggcacgccgagcggattgaggagaatgtccagaggcgtcccgtcgtccagtagcggcatgtcctcgacggggacgatcttggcgatcacgcctttgttgccgtgccgcccggccatcttgtcgccgacggcgatctgccgcttggtggccacccagaccttgaccatctcgagcacgccggacggcagctcgtcaccgcgtttcatctgggccgccttgcggtcgcgttcctcggtgatctcctggacccgcggccagtagcggttggcgatcgccatgcattcgtcgcgcttcgtcgccggcttgacccacttgaggtcctgcgatcgaacgtggtcgccgaacacctcgatctgctcgagaatgacctcgtcgaggttgctgtgtccgaccttctgccgcgtgttcgggtcgatcatcggcccgtccatgaccgtctcgatctccgcgcacatctgcttgaagcaggcgatgatcttggcgttctgggacaggctgtaggccgcgatttcggcgttgagcttcttccgctcgtcctcggtcatgtggagccggcggctgaacttcttggccccgatgacgatgccctcctcgcccgcgggcagttcgagcgagtcgttcttgacgtcctcgccggcgcggccgaagatcgcgtgcagcagcttctcctccgggctgagctcggtcttggatttcgggctcacctttccgaccaggatgtcgcgctgttggacgcgggtcccgagccggacgatgccctcctcgtcgaggttgcccagggccttctccgacacattggggatgtcgttggtgaactcttccttcccgagcttcgtctcccggcattccacctcgtactcgtcgatgtgaatgctcgtgaacacgtcgtcgcggaccagccgctcactgacgacgatggcgtcttcgaagttgtggccgtcgaaggtcaggaatccaaccagcacgttcttgcccagggccaactcgccgttcgccgtggccggtccgtccgcgatgatctcatccttcttgacccgctgacccgggcgaaccagcggcttctgattcatgcaggtccgctcgttgagcccctggaacttgcgcagcacgtactcatcggtgtcgtcgatgaccatccgcctcgcgtcaacgaaggtcaccttgccggaggtgcgggcccgcaccaccatgccgctgttggcggcgacgtaaggctccatgcccgtggcgaccagcggcggatcgacggtgagcagcggcaccgcctgccgctgcatgttcgagcccatcagggcccggttcgcgtcgtcatgctccaggaacggaatcagcgacgccgaaacgccgaccgtttgtttcggtgagatgtccacataggtcacttcctgcgagtcgacgcggcgcatgtctccgcgggcccgcgcgatgacgggcccgtcgaagagccgcgcatcgccgggcacgaccgcctccggcggggccaggatctcgcgcatctcttcgtcggcgcgcaggaacgtggcgtcgccgagcttgccgtccttcgccaccttgcgatacggcgtgatcaggaacccgtagtcgtccaccatgctgtagatactgagcgacgcgatcaggccgatgttcgtgccttccggcgtctcgatggggcagattcggccgtagtggctgatgtgcacgtcgcgcacttcgaagccggcccgcttgcggttcaaaccgcccgggcccagcgctgacagccgccgctcgtgtgtcaattgcgacaacggattcgtctggtccaccacctgcgacagctcgccgcggccgaagaacagctcgatggccgagctgaccgacttgctgttgatcaactccgcaacccggctgatctggtccgggtccttgaggctcattcgctcctgaaccgtgcggcggagcttcagaaaacccttgcgcagctcgtccgcacagagctcgtccagcgtccgcagccgacggttgcccagatgatcgatgtcgtccaccgcgacggccgactcgccggtccgcagcttgagcaggtacttgaggcagtggctcaggtcgtccacggtgagggtcatcgggccggtatcgccggcgatgtcgaacttgcggttcagccggaaccggccgaccttccccagtcggtagcggttcgcgtccgagaacttctccgcgaacagcttcttggccttttccaactgcggcggattgcccggacggagccgggcgtaaatcttcagaagagcctcgtcatgcgacgagctcgcgtcctccatcagcgtgttgagaatcagcgggtcgtggaccttgctgaccaccttgaggttcttgacggacgaagcctggatttgttccagggcatctccgatcgggcatccggcccgaacgagcacgtcgccggtcgcctcatccgtgaccgccgagacgacgtaggtgtcggaggtcagggcgttcgtgcggaccgatttggtcgggtagaactcctcgatgatcgactcgtccgtcgagaaccgcgagtccatggcccgcaggaacgtcgtggccgcgagcttgctcgactggtcgatgcggaccacgagcacgtccttcttcgtgacctcgatctcgagccaacttccccgctcggggatcacccggcaggagtgcagggcccggtccccttcggcctggctcttgatgaagtccacaccgggagaacggtggagctgcgagacgatcacgcgctccgcaccgttgatgatgaactcgccgccgccgatcatcaccggcatgtcgccgaggtagacgaggtcttcgaggacctcatcgctgtccttgcggaccagacgcaggcgaagccgcagaggcatgccgaaggtcaggcgaagctcgcggcactcgtccggcgtgtagcgcggctttcccagctcgtagttgatgtaatgcagcgacatgttcccgtcgtagctctcgatcgggaacatctcccgcaaaagggcctcgagtccgtggccgtcccggctctccggcgcggtcacttcctgaagaaaccccgcatacgacttggtctggatgccgatcagatccggcacccgcatcgcgtcaccgaccttggaatagtcccttaccggacgaacggttaccatcgtggatcttccctcgcgctaatgaaccgagaatccgcgcatgcaaaaagccccggccgcaggtaccgtggcgcggccgagtcgaacggcgggacacgtcaacgccctccgaggcttccggtggaccggctgtcccttgcgaccggtcgatcccgcctgggagcggatgtgcttgcctagaagatcaatcaatactggttgtcgagcgcctcgtcgcctctaaaacgccgaacactgcattatatcggggtcccgtcgaacgccaacccccgccgaatcacccggcccgtcggcgtccgggcaggagcctactcgatcttgacggctccgccggactcctcgatctccttcttgatcttctcagcctcgtccttgtccaccccctctttcagggtcttgggggccccttcgacgagatccttggcctctttcagtcccaggcccgtgatcgaccggaccgatttgatcacctgaatcttcttgtcgccaaagcccgccaggatcacgttaaaggaggtttgttcctcggccgcttccaccgcggcaccgcccgccggaccgccggccgccatcaccacgccgccgccagccggctcgatcccgtggacctccttcaggcagtccacgagcgactgtgcgtccttgactgagagattgaccagcttgtccgcgagggcggtgatttcgccactgaactcgaccgttggtgcttccgccatggtttccgactcctgcgttcgaccctcgccacgctgataggcggcccgtccgatacgagtcatttcatcccggcgcgccgggaccagtcagcgtgcagcgattcccttttgcttttggttgtcaggccgcctgctcggcccgttcgatcatggccttcaggcaaccggcgatcttcgcctgcggcgacctcagacaggcggccagggcccggcccggcgagctgatcaacatggcgatctcgccgaccagctcgcgctgacccttcatcctggaaagcagctcgacggtgagcaggtccggatcggcgtcgagaatcgcctgcttgagcttgagcttgctgaactccctggccgcttcgaccagcgtcttggccagatcgatgcccgagccggtcgtggtcacgagggcacagggcccgtcgaggaccgttcccagcggaccgagtggcccgtccgcgaacgcccgccgcgcgaggctgtttcggatgacttcgaggcggctgcccttgccacgcagggtcgcgcggagcccctgctgctcctgcacgttcatcccggtcatgtcgaccacgcaggcgctgcgcaccccggtataccgagcccgaaggtcctcggtgaccatcgccttaaccggcttgctcatactcccgtccctcgttcatcgtctgtcgacacacgacacacctacgtggtcgccaccgtcaccgacggcgtgcgcgtgcccgacagacaaatccgcttgaaatactgccccttggacgccgacggcttgatcttcgtaaaatggtcgatcaccgcgttgatgttggtgatgaggtcctcatccgaaaaactcgccttgcccacgggcaggtggacgttgccgccatcgtcgttgcggaactcgagccgtcccgcggcgaactcctgcaccgtcttcgcgacatcaggagtgacggtgccggccttggggctgggcatcttgccctgcggcccgagaacgcgaccgagctttccgaccttccccatcatcgatggatgggcgaccgcgacgtcgaaatcgaaccatccgccctggaccttggcgacgagctcgtcggcgccggcatcgaccgccccggccttccgcgcctcgtcggccatggccgggtcgcaaaaggcgatcaccttgcggctcctgccgagccccttgggcagcgaaatcgcgccgcggagcatctgatccgcctgccgggcgtcgatccccaggtgcatggtgatctccacggtctgatcctggctcttgcgcttcttgccgttcttgtacttgcggtccaccttgatcgcggccatatctttgatcttggccacggccgcctccagcgggagcgtgtcggtctgcccccgcgtctcgagctgctttcgatacgcaacgcttcggtatcccatggaactctctttcgatcacgactcggcgtcgacgtgggttcagtcgacgatttcgatccccatcgatcgtgcggtcccggcgaccaccttcgccgccgcctccacgttgaacgcattgaggtccggcatcttgcgctccgcgatcgcgcgaagctgatcgcgggtgacggtgccgaccttctccttgttgggaacgccgctgcccttggcgaccttggccgcgtccttgagcagcaccgccgcaggcgggctcttgacctggaacgtgaacgtccggtcagagtagacctggatcaccacgcccaccggcattccgttcagcgccgacgtcgcggcgttgaactgctggacgaactgcccgatgttgacgccgtgctgcccgagggccggacccaccggcggcgccggcgtcgcctgcccgcccggggcctggagcttgatgaccgccgtgacttcctttttcccgccctttgccaacgatcaccctttcatcttccggccccgaccccactccgtgggactggccttccatgcggtcaccggagcggaacgttcgcttcggccaacgcctgcggctccgggactcactccaccttttcaatctgccagtatccgacctcgacgggcgtgagccggccgaagatcgacacgatcaccgacaccataccacggcgctcgtcaaccgagtcgacctcgccctcgtagctctcgaacgcgccgtcggtgaccttgatctgatcacccttcttgatgttcagcccgctgagcccgggatcctcctcggccttctggcacgcggcgagcatctggacgacgtcatgctcgggcatcgacgtcggtttcccgtcggacccgatgaagtcaccgacgccggtcgtttccttgatcaggaaccagacgttctcggcgaccgagccgtcctcctcacaggccatttccacgaagacgtagcccggatacagcttccgctcgaccacccggagcacgccgccgcgcatccgcttctctttgagcgtcggcaccagaatccgcccgatacggtcttccagcgcctcgatcttcaccttgcgcagcagggcgtcgcggacctgttcctccttgttggaggccacccgcagcacgtaccacttcatccccggctgggccagggccgtcgaggtttccgcccccccctcggcctcatgcgtggcctgttcggtcggttgttccggcgcgtccgtcatattccggtcttcagcacaccgatccagcggaagaatcccacgaacaccaggtccaccatgaacagaaacaccgccagcaacaccgtgaacaggatcacgaccttggtcgagccgatgatctcgcggcgcgtcgaccaactcaccttcttcatctcgccctccgttgcaatgaagaagtcgccggcagcgcggtggccgaagctcaaccaccagcacacggcccccattacgacggcgaaggcgatcgggatccccggcgtcaccagcaggccccagcccgccgtgatgtcctcgtaccccgtcagccggctgcggatgaagagggcgccccagacgacgaccgcgcaggcgccgatgaaggttccccaccgcgtccacttgccctgctcgggcttgtactgcgcgaaggggcccggcccgccgctgcggggcttgcgcggtccgccgtcaccgggtccggccggcgagtcgccgcgacccttgtccttcttccgttgcggtgcgaccgtggttatatcgctttgacccatgcgtttggccccgaagctacgtcgccgcttcatcgtgcggcgcccgcggccgcccattcacggccagccggcgccggtctacaggagcggagggacttgaacccccaaccgccggttttggaaaccggtgctctgccaattgagctacgctcctaagcaagctctgcatcgttcaccggcggtaggttcgccctatttccgtttgatcttgtgaaccgtgtgtttccgctggcgtttgcagtgcttcgacagttcgaacttcggcacaccgccctgaacgttgacgttcgtccggtagttcaggtcgttgcactccttgcattgcagccagacgtactcgcgctttgccgcctttgccatcgattcctacctcgcgggatccggcgctcgcggccggctattcgaggaccttgaccacgacgccggagcccaccgtccggccgccctcacgcaccgcgaaacgaacgccctgctccatggcgatggccttgcccagcgaaacctccatcaccacgttgtcgccgggcatgcacatctcggcgcccttgaggctcaagccgccggtcacgtccgtagtacggaagtagaactgcggccggtagccgttgaagaacggcgtgtgccgcccgccttcctcctgggtcagcacgtacacctgcccgtcgaacttagtgtgcggcgtgatggagcccggcgcagccaacacctgcccgcgctcgacctcctccttcttgaccccgcgaagcaggcaaccgacgttgtcgcccgcctggccggagtccagggttttgttgaacatctccacgcccgtgactgtcgtcttcgccgtcgggctcaggcccacgacttcgacttcctcgccgaccttgatctgtccgcgctcgattcgcccggtggcaaccgttccgcggcccttgatgctgaacacgtcctcgacggacatcaggaacggcttgtcgacgtcgcgctcggggatcggcaccgactcgtcgagggcggcgagcaggtcctcgatcggcttggtcacctcggggtccttgggattctgggtcgccggaagggccgagcccctgataatcgggatgtcgtcgcccggaaaatcatacttgctcagcagttcccgcacttccagttccaccaggtcgagcagctcgggatcgtccaccaggtcgatcttgttcaagaacacgacgatatgaggcacgttcacctggcgggcgagcagtatgtgctcccgcgtctgcggcattggaccgtcggcggccgaaacgaccaggatggctccgtccatctgggcggcgccggtgatcatgttcttgacgtagtcggcgtgtccgggacagtcaatgtgggcatagtgccgcttttcagtctggtactctacgtgggccgtggagatcgtcagaatcttgctggcgtcgcggcggccctgcgactccgaggcctttgcgacctcgtcgtacgtgatcgccttggacagacccttgtggctttgcaccaagcacatcgccgccgtaagggtcgtcttcccgtggtccacgtgaccgatcgtgccgacgttcacgtgcggtttcgttcgctcgaaaacttccttagccatctaacaagttcctccactcgcttgccgcgaccggttgccttccgacccgagcccgtgggctgccgcgcgaaacttccccgttcaacagaatagaaaccttaccgctcgactctccatcatcagtccgtcgtgacacgaccgcatgccacgcgacgttcggcaagctcgtcaggcgccgctcaaagctgctgacgggagtcgaacccgtgacctcgtccttaccaaggacgcactctaccaactgagctacagcagcatgacgcgacagcgagccgcgttgctgcgcgtgcgcacagccggcgcgcggcccgccatggacattgatcgggatacgctgcgagaagccacgatggtggcttaccgaccgcgcatcgaatatcgcacttccgcccgcgggcttaggtcgtgccggcgcgttatcagcgcccggagcccagcgagtataggcccgacaccgagcctgtcaaacgcaaaagtcgcggaaatgcaggaccggtcaatcacccacgtgcggccttccaacacctgccacagcccgcaagaacggcactgccggcatcgacgtcggcagtcagacaccgaaagactggtagtgttacagtgttgaaatataagcaaaaacgcaagatcatggcgccccaatcgcttgccgcgcaagccgtcgtgaacgctcgcactcgaaccttgtcggtccaacccgagccggataggctctcatggccaacgcgcaaggccctgcaaaatggctgctaaacggctggggctgacgcgaccggagcaaacccacaagtggagcggcgacccctgggcgacagtggcctgagcgtgtccgtcatcgggctgggtacctgggcgatgggtgggctggaagaagtgtggggacaggtcgatgaccgtgagtcgatcgccactattcatcaggccttggactgcggaatcaacctcatcgacacggccccgatctacgggcgcggccacagcgaggagatcgtcggaaaggccatgcgtggccgccgggctgaggtcgtcgttgcgaccaaatgcggcctcaagttcccggcccgtcctgacgagctccctccgcggtccctggctcccgtcgatattgcttcggagtgcgaagacagcctgcggcgtctccgtaccgacctcatcgatctctaccaataccactggcccgacccggccacgccccttcgcgacacgatggccaccctcgtgtccctccgtgatcaaggcaagatccgcgcgatcgggctgtcgaacttcagttgcgagcagctcgccacggcacgcgaattcgggcccgttcatgccgtccaggcgccctattcaatgctatcccgaagagcggcggaggagatcctcccctactgccgcgagcaccggttgggcctgctcgcctacggtgcgttgcgccgcggcctcctaaccggcaagttctccgaatcggacacctttcgggggatccgggggcgcgatgccgatttcacgggggaccggtttcgcaggaacctccgagtggtcgatgtgctgcgccgcgttgccgacagttaccaccgcacgcccggccagttggccctccagtgggcgttgtcctcttcgggagttacggctgcgctggcgggcgcaaagcgtccttcgcaggtccgggagaacgccggcgcgaccgggtggttcatcaccgccgaggatcgggcacgaatcgagcggctcctggcggatggtcacgatgaagcttgaccccacgcagccgcagcaggccggggccgtcgtcaccccctcacatacgaagccgtcgtcgtcgctccgtcccgcggcgggcagcgtcgccctcgactcgctctccgcggccagcggcgcgttcacgatgcggtcggcggccatcgcccggcccgcaaggcaaccaagcctcatcgtggcggtcgtggcgggactggtcgtcggcacagcggtcacggtcacgggccggttcgaccacgtttgccgggccacgctccacatcgcggccccgcaccagacctccgcacgggtcgacgagtggcgccgcactctggccgattacgtggcgcgcgaactcggcgggtacagcgagctcaccgcacgggcgcagtggttcatcgaacccgtcggcgagtcgaaactgcggctcgggctgatggcacccggtcgagaggtgggactacagcaagtccgtggcctggcccagggcttcatcgcgtcgctcgccgcgacggcgaagccaacggcgacgaccccgaccccagccgagaagacgttgtcgcagatcatcgagcgccaccgaaccgcagtgaccaccgcaatggtcgaagccgcgaatgccctggcgctggtgcccgacgacccggcacagggtcgccgccgtgcgttcgaacggtgggagaaactgcgggacgagttccgaagcaaacgaaagacgtcagaacaggcacgtgccgaactgcgccgcctcgagaccgagccggaccccacggtcggcatcgtcaccaacgaggaccgccgcgctgcgtggggagcggacgccgggctgcaacaggacctgagcgagctggcgctgcgcctttcggaactgaagctccaactcctcaacgtctggcagagggccgccgggccgctcgaccggctcttgaacgacgcagccgcgctgaggggcgttctcgagtcggcggcggatgacccggggctcgctgatggacaaccgcagccgaccgagcttggcgacagtatcgccgcgcacctgaaactgcttactgagttcaccggccggtggacctccgagttcaaggctctggagccgatggcaatcgatccgcatggcggggaggtgctcgaaatctaccagcgaacgcgccgccggctgagcgactatttgttccaagccgacaagcagctcgccgcgattcgcgacgccattcgggacctcggcgagttgcaggtggacgacgcccggtaccacgtcttccaatcagccttgttgcgggctttccacacgctcctggccgcccatcggcggttcgagttcgccgctggcgccatggacgcgaagaacaacttccgcctcgataccgccctgaccggtgcgctcgggctgcggaagcgtgcacgggcacagatccgcaggattgaggacgggctggaaaccgccgcccgcgcccgtgcccggacccgtcggattcacgacatcgcggaatcccgacacgccgtggaccaccttcggaccactctcgacgacaccgtcgaacaaatgctcgatcttcaggaggagctgaacatcggtgccgatgactcggctcggttcttgcttgccggggcccgcgccaagctcgccgaagaccgcctggagcgactccgcggcgacctggtcgaactcgacgcgcggctgaccgaactacaggcgattcgatcggtggccgccgaggccccgaacgtggaactcgtttcctgtgaggcgctcgaccgcccgatcaacttcgccgcgcgcgtccaggtcgcggcgctcgccgcggcgctgaccctgctcgccgtcttcctcggccagtgctgggtcgcacgcggacgctgagccttcgggggcgtcatgctccgggttggagccacgcgggccgtgtctagccgatgtagattctcgtccgctgggaccggccgttcctggccgtcaggcgatgccagcaggactccacgttcagcgagacccactgccgatcctccttgcgaaagtgccagtccttgtcattctggaaatagagctggatgccggggccctcgatgatgttaacgatctcgttgttgtggtagttgaacgcatcgtagtcggttacggaccgctggcccatctccgagtagaggtagttgagctcgagcaacatgtcgttcagttcggggtccatgtcgacgacgttcagcccgatggcgcgcgcctcgcgcggcgtaatggggtactcgtgcgccgggtattcggcattgagcgcctgagcgatccgcaccgcggcggcctgatcgggcgtgtggtagcgcagaatctccgtgcacagcttgatcgccagcgacgtggcgcggtctacggcgccgatcaccagcggatgaagatgcttgtacaactcctggaacgggttgacgtccgtcccgcgcgaatgttcctcccacagacggatgacccgcccgacctcgtcctgcccgacgtaagcggtctcgttacgcggatccaccggcccgagggcgtgctcgagcgaggtgtcgatgggggtcagaaaggccagcggtcccatgtggatctcgtccgcacccagcgcgaacatggtagccgccgacgcgcaggcgagcgggacgaggacggtcaagtgatcgacatgctcgcgaagcaggtgaatcagccgcagcgccgattgcccatcgcctccgtcggatttgacgaaaacggtcgctcgcccgacgagacggcagtgccgaacgacctcatacagggcctggacgtcctcgccgcacacggaccccgtctgtgaggtccaataggtcaggaacgtcccatccacggcggcgtcgagacgcttgacgagcctctgtgtgcggctgaacaataccggcggcatcttccgtcggcgcgagcgcgccgtggcgcggcgcggcgtccgtttgggcgacttcctttgtttcatcatgtctccgttggcacagaactacgcgtccgggggttaccgcgctacctcaacgatcaagcatcaatacacgcgccggtcggccccgtaaaccacgggctgcaccgaacttgcggcaacgccgcgggaccctaaaatctcgctttagcgatcaccgctccgatcgtagcatcttgtggccaagtgcgggagcagcctggatgtttcgacgcaaagacacgagacgtgcgacgttcgccgttgcgctgggagcgctcgccagcatggcgaccccgccaccatgctgggcgcttggccaggacgccggcgcgatcggcccgtcgacaacggcagcggagcggaccgaacctaagaggccgactcccccggtgcccgagtgggtcctcgacgcgcgactctactttgtcgaggtcgacagatacttcgacggcgatacatccaacgacccggctgagaccgcaagctgggccgcgcacattccgaccgcgacgccgcgggccgatgccgaggctgtcggcgcggccatgacgacgcccgttcgtgaggccgagcgccgcacctacggcggcgacctccagggattgtcggcgcgcctggatcatctggaagaactggcggtgaacgtgctggttctggacccggtcttcgccgggaccgggggccaccccaagaccgttgccgacccgcggcacattgacgatgccttcggcatggcaggcagccttcaggcggtaaccggcgagacggacgatccgtcgacgtggacattcaccagcaccgatcgccttttcctcgagttcgtccgcacggcgcatcgccgcgggttccgcgtcgtcctcagcggcatgttcggagacgtaggccacgccgtggccgccccggaggccgcggagcgcacactgatggccgtcacccgacggtggctggatcccaacggcgattcagacacagccgatggaatcgacgggtggttcgtcaacttcccgacggacgaaccgctcgagttctggccgaagtggcaggccatggtgaagtccgtcaatcctgccgccgccttgctctacatcgacagtagcggcgtacccagcaagaccatccgcgagagcttcgacgcatatgtcgacgtgagcgcgtcacgcgccatccggcagttcttccgtccgggccggacggaaccgacgctcgacgcgtttctggccgacctggcgagccggcaggcgaccactggggagaccgagcgcccggcccgcctgaccatgctgagcgacctaccggggccgaggttgcttaccgcgctggacgacccgggcgcaagctcggcgggcgttccatcagtcggcgacaacggtccctcggccggcgcgattgaccgatggcggcttgcaacgatcctccagcatttctactcggcggcgccgatcacctactacggcgacgaaatcgggatgttcggcgcgtgccgtccctggccccgcccacccatgtggtggcggaacccgccacccgggggcgagacagcgcgcgggtaccgcggcgacctcttcgggctggtccgctggctgcacaaccagcgcacacgctacgctccgcttacccgcggcggattcgaagcagtcctccaggatgaggagagacgcgtctttgcggtgtcgcgctcgctgccgggcgacagagtgattttggtcgtcaactatggcgacaagaagcagaagatcatgttgccggtcggtgaacccgggacgatggtggggctgctcagtccgaacatcaagccgacgccggcccgcaagcgggtacccgttggcccgccagaagccggtcgggcgaagaacggggaagtcctgtccgagcccagtgaggcatcccagggtgatgccggccgggatgcgggcccacatcgcgatgcagccgcggccggtccacaggtcatggaactgctcgactacagcgatatccgccgcatccgaatgggcggcagccggcagtacgtcaatgaggacggcaaggtcgtggtttgggtgagcccgatgtccgtccgggtggtgttggtcagcagcgacgagccctggcgccgcccgaacgagtagcgggcgatagcgcttcaatcggccggcacgcttggcgtccgcggtcgggtcaccagaatggacggctgcttgagtgcgcgggccgcggccaatcgcccgaggcgcggtcacgaccggcctgttgcgagactggacatgcgaccgcaccgcgtgacgccccgggacctgcgtggcccggccgttcgcgccgcccgcccgcctgccgccaagagagccggcgcgccgcgaactcggaatgagacgatggcccggcgcgaggcaccccgatgcgctccgcctcttcgcatcgacgggagtggatgggaatcgaacccaccaggggccgcgcgaacgacccctcaacggctttgaaggccgcgggacggattccgtaagtgacgagcctgcaagcacttacgaacacaccgttccgtttcttaccgatttgcttaccgctctcgaatcggaagcgccggatctggctgccgttgtccgacgatgggccacactcccgccggccgtgaaggcgagcatcgttacgatcacggaggccgtgcaacccgactcgggtggcgcgtgctgacgctactgacactgacacaagcccccgtcccgacgccgggaaacgggcttccgtcagtgcgcccgtcgtcgcgtgggcatgaaacacaaactggcgaacgtcgagggccgaatcgtcgcgtatgcaacctgatgcagccggatgcatcacgcgaatagcgggcttctgagcgtttcgggcgactcgatgcgtgcggaaacgtcgtgcgtccaacagccgcttcaggatcgcgaggaattgtggctggggcgtgtcggagcgcggcggtccgttgctgcggcggcgcggtggcgaacgatgacgacgaccaccggcgccgtcggatcggggcggaagccaccctggcgtcgaagctccaccccgggaatccgaatccgccccgtcctggagcgcgaaaacgcgcctgaaaccgatcggaagcgtcggggacgaagaaccggccgcggaatcgaaactggccggttatccgtgtcctgacgcagggcttctccggattgggggtggatcggatgactccgtcggccggcttcgtcccggtcgcccgaagtcgctaccgacgaacgctccgatggcacgccgatcacctcacgcgcgtggttcgcgatgacacgcaccggacgtgcgtcgttctcggcccgaaaacgaaagtggatggccaaggcgacatagctggatgcgaatttttcgagctgttcgccgaaaccccgtccttcggttttcggttagaccgttttcgcccaccatgaagtcttccggtttgtgcttcaagtaacaacgccgatccgcgtcaagccaacccgacccaaggcaccgattccgggcttccgcgcggggaatttcctcgcgtctccctggccggcgtaccggtcccatcaccacggtgcgcggcacagccgaaccgtcaaatccacccgccaaagcacgcgagcaccgacctaacgcgcgcgcgaagcgtcgatttcgatctctgttgacttccagaacccgtgttcttgggcggggaatggcgatcggaaaggccgtaatcccgaagtacgacgttgctgctgcgaaggtgtaacccaaagcggagtcgccggacacgtgccgcaccggcatctcaagaacccatcgcaccgtcccgtttgcacagccgcagaccatgtgaaatgccttgcggacgagcggtatctcggttgtccggttgattccttcccatgatccggggcgaggctcgcaggtacaatgtatccgcccggcgcggatgaagggaagcccgcgctccgagtcttctctcggcgtcggcacggcgaagaatccgccctcacggtgccgagaaggcggttttcggagacgccgcggctccgactgcccgcggggcacgcgcgcgggtggagcatctcatcgggtcggcgtcacgtatcgggcacgcggcgtacgaccaccggtgttcggagtcggtgggcattccgcacggcgggacgcacgatttcccgatccgtcccgcgggacgccgagcatcgtgaggacgcggcgccgatgaccgacctgcggcgggctcggatcggaacgatggcccgcgtcggtggcccgctccggagtcgacccagaccggcccgatcctgcccgaaaccccgccgaacgcaacctcaaacgcggccatttcgcggcggcagggaccaccgtaatcgcatccctaacgcccgataatccttgccggaacgggcgtcacggccggggaaaccacgattcggcggcatggcacctccgacccgaccccctcgctcgcgcgcacgcgtacggaacttcgatcgttggcgtgccgcataaatcagatcaggaagccacccctcgccgaaagctcgccggaccgcaggatgtcgttcggccgcgcgggacggtcgccggcgcgggatctatgcggccaacggcggaatcgtggcaatgttgaccctccaaacggcctactgccgggagttggataagttacccctcgcggtgcggaacacacaaaccgcaaaacggccggatgaggcacttaacgtcccataactcggaatcgcgagtcggcaacctgcggtccttggccggcaacgcaggttgatgtccgcggaatccgcagccgctacgagcaatcggggggctccggcgcgcgcccgcgcgcgaggtcgctaaaacacctcgcagcctgagtcgagatgcccgaccaactgttcgcgggcggcgcgttggtggatcagcggggctgctcgtcgcgacgttccgacgatcgggccgggcaccagattcggtgcgggggaatagcgcgcccgaaccctcgcgagccctcggacgctcgatacctcgttcggcgcatccggctcaaggcgcttggggcggacacgggtgtcggcgcgctccggttccgccgcgtgtgcatccggtggccgccgtgcgcgcctcgcctgcgtcggtcacgtcggccagcgtcgagtcgctgtcacgcgcagtgcggacggtaacacacgtcgggaaattcgatccgtggcgcggggcggtttgcatcgtgccaggcgatggcacgtccgcgacgctgcatccgttccggtcgggcaggaatcgggggcagcaaaacggctcggacgacgcccggctattctcgccccgaagcctccgcacgcgctgtcatacgttgcgggttcgcaaagcgcgcatccggcccaaacgcacgggcaacggccgccaacgcgcgttgatacgttcgacgcgcgcgatgataccctctcgggcgccgtgatacttcgcttcgcgccgtgacccgtggacgtcgctgatcaccgcgctacaatcggagcatcatggacgaacagcgacacgcgagcgggaacgtggaaactggcgacatcttcaagccggcgacggatacgttcatggccgccgtggaatggacgaagaaccgaaccgtcgtcgtgttccggcgcgcgcgaaacggccgagagtacgtgcgctgccggacgttcaatcgccaccgggtcaaacaagtctggtatccctcgccccgtttctacatggtgccgaccgattgcgccgaggacctgggcagggcgatcatcgccgcggcgaacggcgagccgcagccgccgcccggctggtggttcgacttcgtgaagcagtacgacgcggggaagtggcggagtaagccggatgctgagccgtccgcacccgacgtggccaacacggtgccggtggcgtaacgcggaaggccgcccgccgatgcgcagcaacaccccgctcctcgtcctggcccggtgcagccgcggcgcgggcgagaatggtagcgccgcccggtgcggtcacgctgaccgcgagatgcgctgtcggggtctgtgaacctcggctttgtcgcctacggcttcgccccaagttgggcggcaatgtcgacaagcatgctcgaactcagcctggacctgtccacgatcccggtaagtcggccggcttcgtccacgaccggaagctggtcggtcgcgaggttctccatcgcctgcaacgccgtccgcttgtccgattggaccgacagcgcgttggccgcggagatgaatccgggcagttgcgccaagggctcttcgtccgattgggccagccagcgcgccagatcgttggagtgaagcctcctcccgcgcaacattccagcgaggcgcttggcgtcgaccaacccgaagaagctgccatcctcgcgggtgaacacgaggtaacgcaaagcgcccgcttgcgtgagccgatccacgtagtcatcgatggccccggcgttgtagccgctgtagccgagccggaagctcagggcctctgagcccttctcgatcaggcgcgggatgtccccgacaccgcccttcgtcgcgacttcaatcgtttcgaccggcaaggccgacagatcggccacttgggcgctgacacccgactccgctgccttgacgaacgccgcctcgatggagaattcggcgagttcgagctttccgatcttgccggtaaggaacagcagcagcccgaccggcaccagagccgcaacgatgtccgcgccgcggaggtcgaacttcgcaccgagcctggcccgtatcgcgataaggatggcgagcaccagcgcaaaaaggccgatggcggccacgacggagtccatgtcgttcacctcgcaaggtcgcccgaggttggttctcttcgccccgccgctcggtccctgcgtattagccccgcaagtcgacgtgttcactaacgggaaacggcgagagaccgtggccggcgattccagcgataaagtgggaccggatgcgggctcggcggcaagcccttgtcgcctaaaaaggtgatgcccgagcagcggaatggtggtatcgtgcatcgaatccaaccgggtcgcccactggcgcgtgccttgccgacagggtcggtgcggcatcacgccgcgacttggatcctcgcagccgatgttacgtgagcaaccccccgtcatcacggggaaaagggagagggaactgcgtttacctcgttggggcgggaacacaaacgtgtcacggaccggtttgacggacgaccacagcggcgggcactccgcaggtcaacaccggcctaccgtgcggcgcccgcggcgaccgacccatttgttcacgtgcggataccgacgcagtaacgggggccgtggaacgccatgcatgccccgcccgacgcctcatgcacgtcgtgcagggggtgccaagggggcttggcacgcctcgggcattcgtgcgtacgaccaagaacgatcggcacccctggccggtcgccgcgcgagtgcgcgccacgcctcggcaggcgtgttgcgtgcgatccctcgcagaagcctccagtggttctgtgccgtcacgcggcatccgagccggcggccgaggcaaccgccgaccgtgtcatcgacgaaccgatccgtcggatcgttcgatacaacggtgccatccggcacgatgacgaacgagtcaaggagcgcggccaatgaaacttcttaaggtcctgttcactatcgccacagcacctccgctcctcgcagccgattaccttgtggagctcccaatcgacggaataccgaaaagcgcgctgcattttcatccgaccggcaaggccgcgtacttcgccgacgaggaggaaaacatgcccattcatgccaactacttccctcggcagtgtactgatcacgacgactgcgactgcgcggaagccggcctagcgcacctcctgattgccgcttgccgaaacgggtccgagcctgcccttgccagagtcggcctaacatggcaacatgtcgtgaaggaactctggtccgacaccacgctttacgattcgcccacgccctggcatcgcgtgcccttcgatgatcccaacgacggcttctttctttggtatcccgactgcgcctgctgcgacgccacaaatgttcggtggaacggatcgcccggccagacaaggcggcttgaaggtctaacagccccgttccttaaccgagcaggcggactcacggccgttgaggctgtaaggctttataaattggtcgaacgcgcgccactcgatcacgtcggaccccgcgaccaagatagagttagcaagccgctgatatgcgctcgcatcgcgtatgcgcactttgacaaggctagggaaaacaactacatgaaagtccactacacggttgagggcgatcacgtctttgtcgtctacattcacgagcagttgttcaacggcgggaccgcgtgcgcatacatccgcactcgctactactcccggacagcgcgcgttttccgtgtcatggccgggattgactatctgtttccgacctatgacgccgacggcacgttcaagggcctactacaattaggctcactcttgtacgatgacgaggtcacgacgccagccacggccatgcgcgaatcgctcgccggcaaccgtacgatagcagagaaacagcgccgctagtggcgctcgacacagtccgatcaggagagcgagtgttagcaagcggcgcaacgaagctttgggtagcaggacttgtggttgtttacgtctacgctggcggcgcgccgctatggcacgcaaggaaggagttcgaaaagaagcggacggaaaggaaccttcgaagagtcgcatttcttggcgccttcggactattcctgggctacgatgttgttctgtggctccttgttgccgatgccggcactgagcgagacattagaccgtgcatccacatcgcaagctgtgacgtcattgcggcgggcatagcggcgtttgccgcatggtgcaccacgcggagcaccatcgctctcgatggggtattagtacgcaactggtggtcgcgtggcgccgtcggcgcgttctgtatgtattgcgttctgataggcgtgtattgggcattacttgtgcgtgcagacgcggtatgtcctatttgggaatgggcgcgcgatgcatggtcggctgaagacagcccgcttggagctttgtatgagtgcttccgggacgattgccgtcctcgtgtgcggctgtattgggcgttttggacgtggctcctgtacggactttgtctcatcgttggtctggttctttacgctggtagcgcgagggcggagacgtatgcagcttggcttttggtggcctactccggctacgttgggcttgggcccaacggcgggtttccttggtatttccgtgtcctgctaattctgccggcttggcttgcgtttcttgtattacgaagactgtggagtgggacgatgcgaggtgtgagccggcctcggtagcggccgtttcgcaaggcatgacgacgttccacgagtttgaaagcgacacccgaggctgtttggtttccaggtgaatctatgggcggcttggaaaggagtgcgttcatgtatgagcgcatgacggcgacagccgttgcgatcgtgatggtgggctgcgcgtccacgatgccgatccagccggcgcgtggccagtccaacaccgagcctgagtccgtgacccgagcgggcgccggggcggccggcctgtggcagcttcggtcggagcatctaatctggggtatgcctcggcaaacggacaaccggcacaacgtccgattcccgggcgagacggacccgcggcccgacatctcggtgctcgtgcgcgagggcttcgtcatcgggcattacgacctgtacagggtccccgcgtgggtcgccgttcgatggtcacgagaggaccacgacagcatgattgacggcagctacagtcgcgacttcggtccggacccggagctgccccggtacgcgcaggccggaacgagctacgaccatgccacgtcgcggatggagcggggccacatggcccgccacgccgacaacgaggcctggggcgaggacaactccgacatgggctgcctgatgagcaacatcgtcccgcagcacaaggatatgaacggggaggcgtggaacgaccttgaaatcctgcaccagggcgtcgtggccgatgcatcgatcggcatcagcacagtctgggtcatcagcgggccgatcttcgaggacaccaacaatgacggcgtcgagaatctggctgggcaggtcggcaacggcgttggcgttccccattcgacgtacaaggtcatcggctggttcgatggcaacggcgagttcaacgcccgcgggtacgtcgttcggcaggaggaccgcgtcaggaacaacccggcccactaccttacgccgatcgacgagattgagacgaatacgggcctggacttctttcccgagctgccgacggctcgggccgcccagatcgaggcgccgcaccacacgacgctgtggggctctgccaccggaaccgggccaggaacaggtggcggcgatggtgggcaggttcgtatctcagcgctgcttcccaacccgtccggcgacgaggcccagaacgaggccgtgacgaactgcaatcacggaacggcggccgtgctcctgaccggctggaagctccgcgacgccgcgggccgaacgtgggtgctgttcggcacgctacaagccggcgacgagcggacctttacgcgggacggccagccgatggcgctcaacaacaacggggacaccgtcgagcttctcgatgcgaccggcaaccctgtcgataccgtgcggtacacgttgacccgagacggcgagtggctggatgccgcggacttgcggtgatgcggcggtggcggtagtgccgcattttcactgcggattgttcgattgtgtccgagttgcatcgcactaagtggacgactgacgcatcctggtagaattcctgcacaactagcagatgtagtagcagatatgcacgccatgagatactgcttcgaactgaacggtcgtacaatctgcctccccctcccagtcgcgcacgatcgctggtggtggccctgggtactggagcctcagcccgacccaaggatcatcgacaatcgcttgaagcctgccgtggcgaagggccttgccattcttggcgccatcgatcggttgacaagggagatgagcccgaaactcaggagcctgctccaccgcgggctcaaggacgcgaccgaagagctccagcttcccgaagaggtgaccctccacctacagcggatcgggagatgctgcggtgattcccgcgggacgctcatcgggcgcctcggcagcgaaccactcctgtcgggcggacgccttggtcttactctcgtcgctcggcctcgcgcacggctcggcgcgtgcagttctgccgcccggttgcgtcatgggccgactgggtcggaggacgttgctgggtacgaccagaggcctgcgcagaacgctcgcggtcgggccacaacgttccaagtgaaccgcaggattccacagagtccgggccgctggccagtagggccacgggaatctgggctgccttggaatctgcggcgtgggccgagacgggccggcgcatctccgggtggcggcgggtcgccccacggcgaggataagcgaaccgagagcggtcccactccccgccacgtcaatcccgacggtcgagggggttgcgatcccgcgccgtgcccggcgggactcgtacgaccgtccggatcggaacctaccaaacgaacggggtagcgggtaggacgggaggggccacagttggaggatcgcgtacgtgagtccgaaggcgggttcgacggggtaaacagcagccattgccgcctcatggcgtcaacgcggttggcccagcgagcgggcggccctcggccggtgccgaagcgcaaggtggtgaacggctcgcgtgtcatggtcggcgcccgggtactcaagcgggcgcggaggaacgtcatgccaaggtcgcggaagggtcagatgccggttgtcggagtcatcatgctgatcggtacgggcatgttctgcggctcggccagttgggcgcagcaggaaccgaagagaatcgagatttcgaagggtatccagctgaccctgatggaagggtgggcagaggtgccgtcgcggtacacgaacgctgtcgaactcgtgacgcctcccgaggcggcaaagacgggagcgccggcggccaagatcgtcatcacgacagagcgacgaacggattacaacgaggccctgcgccggattgccgaaatcgctcgcgagtacaagggcaagctcgaattcctggcgatcggcggctggcctgcgttgcagcgccattacgcggcgcctttgccccagcggggccaaaatcgcaacgttggcgacaaagacgtctcgctccgggtcacgacggcgattgcctacctggacctgctgcttcgaatcgagtgcaccctcgcactcgatgcgaagcctgagttggcggaccaagcggcgacgatgagtcgtaccgtcaccttttcgacccaggctgatcccgagcaagtgaagaaggagcttaaggccctttccgcggtgcacaaggaaaacgatgcagggggacccggcggtcccggcgatccgcccgacccgatgccgcccggtgacgaccaagatgggcccgcgccaagcgcggcggccggcacccctgtcagtgtacgggcaggggtcggtgaactcgaaatcgcggtctccaacaacggacagaacttggtcgtcggtacgaacgcgggttatgccttttcgaacaatgggggctcaacgttcaccgccgtggcgggagggacgcccgctccgttcccacgcgacggcgatccctcgctcgcgttcggggtaagtggcgcgttctactatggattcatcggctttccgaacggcacccccgccgccggcggcgtaaccgggtgctcgacgggtatcagcgtctcagtcgacaacggcgcgaccttcgtgtttcggaaccatgcggtgctttgccctcagagcgggaccggcatctgtttccccgatcaggaacacattgccgctgatcccgtcaacgctgcccctgccggcggcgatcaagtttattcggtctggcggaacttcacaccggcaggcatggcaaccagttgcaacagcatcagttccggattcgtgactccctcgctcgtctgttcacaggacggaggaaacaattggactgcgccgcttgcactcggcgcgggcgatttcccgcgaattacgaccgcaccaaacggcaacatctacgtcgtgtaccgggtcggcgggaatctaatgctcgatcggtacacggcctgttctgccgggcttgctcggccagtaggattcccgagagtcgtcgcggccgtgaaccgcgtcgcctgtcccgttgccgggttggaccgctgcaacaacgggaatgacttatccagtcataccgttgccctggacgacaccaacccgaaccacgtgtacgtcgcgtacgccatcaacacggcgccgaacaacgagaacattcaggtccgagactcgatcgacggtggcacgacgtggccggcagggcaggccgtcacgctcaattcgcccgtgaacgctcgccgattcatgccgtgggtctgcacggagaatggctcggcctacgtgtcatggtatgatcgccgcgcggcgacggtctcgaacaacgatcttacggacttctacgtgggaggcgtgtcggtacaggcaggcagtctggtcgcacatccggagcggaacctctcagtcaatgccgacccacattgcgccagcgggtggccatgcggcactcgggcggtcggagactcggagcagtgctcggtgcagcctcagttggccggtcgctgccgtacgtccaccgggggcgggtccaacaccgcctgcgacttcagcacaacagtctgcccggtcggcgagacatgtcaaaccggtagcggatgcccaaagtacggagactacaatgggattgggtgcgccgatggccgcgtgttcaccgcatgggcgtccgcaacggcgccgcccgggctgccagtcgccgccggcctcaccacctacggtgaggtcgtgggcttggcggatttctatgtacgagattggaccgacgaccttgtaagcggcgatgacggggcggagccatcgactcatagcgtgttctacaaaacgagcgacgtgtggaaccgccgcggatcgttgcccggctcctttacagtcgacgaccagccgccgaatgaggacgccggcaatggggttggtaatatcggcgacaactgggctttcgcgcgaattcggcgtaacgcatcacctgtcaccggctccagccaggtggtcgctcatttcctggtctccaaactaggcactgggagcaactacgttgacgccggtgtcgtcgatcccgatgtgaccttcatcggccccgacccgaccgtcgtgttcaacgccggggatcttggccccgcgatcacttctgcgtaccgctggcatctcaacgcggtaacctccacgcatctgtgccttgcagtggagatatcggcggttggcgatccgtttgtcgcaccgagtcttgtcggggcagcgcccgggtggccaacgacagatctccgggtcatcaacgacaacaacaaagcgcagcgaaacatgggcctctcgaaaactcccgctcgcggtgaaggaggaagtccgggctggtcggctttctatgcaatcgcccacaacgcggccacgtacacccgggacatggagctgcggtatcgagccacgcaggggtttcgggaggctcacatccgcatcgtcggcgagcgcgatattcccctcaggccagccggaaccgttgtgctggagcgcatgctccctggcgaaaaccggtgggtcgggctcgccttcgaggcgcccaacggcgaagtaggcacggattccgcagtcgatttctttgaagtcgtagacgacgagccgataaacggattttcgattgtcgttcgcccttcgtccatgcgcgacgtccttgcgtccaacctggacctgcatcgcgcagttttcacgcgccttgccgcgagcttcgcctgcgacggcgacgaagagcaggccgtggccccgctggcaatgattcgaagtgaaagcacgtatcaagatgggtacagcgaattccttcggtgcgttcccgagattgctggtcgcgccatggcccggctcgttccggaccgttccgaggatcccttcggcatctgggatggcatcaagctcctgtcggaggcatccgcgaaggtgcggcccagcgagggcggagtggaggatcgacagggcctccgaactgccgcgatgttccacacggcgttactgaacaagctcgactcgttcctaacgatgattcaactccgaaacggggataccgctgacatcttgcaaatggttcggtggcagcttgacctgttcgccaagcgcttgccaaacctggattgctcgcgagacttgcagcgagattcgcaagccttcatcgaagcgttcacggtcaggcgcgccggcgtccgagagtacccgcagtacctcgggcagcaattgcggtgtctttcggaaacggcacgcctactcggttgcggtggtgagctcgagcgcagagcaggggctcttgccaaggtgctcgattccccgacgatgctacagaaagcgcaccgcgagtacttgttggcgctacaggatgcgatcgacggcagttcctgactcgaagcgctcccgaccatgcgcttagactcagcagattgcagcgccggacgttacgaaacagtgttcgatagcgcttccttcccttggcgcgtcgcccgtcgaatccgttcgtcgtcgggtgccagcagcgctgttgtcaccgcgtcgcccaagaatcctcgccacagcctgatgggtccaacgcctggacttgccggtcttggtcgggacccggcgggccgtcagggcttcggcgatggcttccagcgtcgttcgggcggcgcgcatggcccggatttcggcgatgacggcctgctcggcgtcgttggggatcagcgtcgagccgtcggcggctaggtcgaagccgtaggggacggtgccgacccgctggccgttggcccgcattacggacagggcggccgtcgtccgctcgctcacaaggtcccgctcgaactcggccaggacggccagcatccgaaagaccatcttgccggcggccgtcgtggtgtcgatccgctcggacaggctcacaaggtcggccccggcccggtggagccgatccgcgatggcgtccgtcgtgctccgggccagccgggacaggctgtagaccacgagcgccccgcccttggtccggcacgccgcgtccagggccgcacacaggcccggccggttgtcggcccggctcccggacaggcccgcgtccgaatgaaccgccacgagccgatagtcgttcacttcgcaccacgcgccgatcttgctgcgctgcgcgtccaggctcacgccgtccgccgcctgaatcgtcgtgctgacccggacgtatccgattgctttcgggttcatcgttggaaactccgaaacggcaaggggcgggcggcccgacgttagccgggaccggcccgcccgatgccgtgggttgctattcgtcgcacatttcgcccgcttcgatccgttgcaggaccgcccgcatgttgttcttgcacgtctgcacgagcttgacgtaggcttcgacgggccggccgtccaagccttcggcctgcgcgatcatccgggcgcgctccgcgaacgcctgcgccaagccttgattcgtcaaggtgattcggtggcaccggctggcgaacggcccgctgtccatatcgccgaacaagccttcctcgacgcgccgcgtcgtcgtgaaaatcacgacacaatgccgcggcaaagcttcaagaaacgtgaggaaagcatcgaccgcgccttgtgtgaccgcgtgcgcttcgttgacgatccagactcggaacggcttggacgcgcaccacgtcatcgtccgcgacgcgcgttccatatcctcgacggcccgcttgtcgcaccggccgccgtccaattcggtgatgaagaaatcgtccgcgagcgaacgcgcgatgatccaagccaaagacgtcttgccgattcccgaattgttcgcgcctgcggcttcgatccagaacgcgccgcggtcgaagtcttgacgttcgatgatccgccgcacgcgggccgcggccttatcctgtccgacgaaatcggcccacgtggccggccgatacttctgatacaacatcatgcaccgccttcctcggccgaatcgccgaagatcgtttcgatgaagtgattcccgaccgcatcggtggacagcgcttccggtcccgcgccgtcggtgtcatagtccatgacgatgacgcgcatgccggccggaaccccgccgacgtattggacgattccgccttcaatcgtgatgacgatgtcactcatacggccaccgccttccgcttgttgcgccggttccgctccgctacgcattcgtgaagatcgtcccagtaacggccaagtttcgggcaatggaacccgtcccgaatcgctcgttcttggatgtcgatgaccgaccgaagatcggcgatggtgaacgccagcgccatatccgatagcttgcgaacccgcttccgtgtcatcatgccaccgccttccgcgccgcgggcgcttccacgtcatcgatcatcgtccgggccgtatcggcgatgcgctccagactcgcccggagcgccttgctatcgccgtcccaaagcgcgatgtaccggctcgcccgcacttccacgtcaaggccgaagtgccggcagaccacgtaggcgaccgcttcggcttccaattcggcgatgctgcgcgagcgctccggcatggtcgcgagcgattccttagacttgtgcagcgcttcgtgcgccaattcatgggcgagcgttttcgcctgttggccggttccgcgcgtgtcgtcgatgtccacggcgccgcccttggacagaccgtaaaccccgcccgaaagcgggccgaaagccacgcgaatcccgcgggaatcggccacgcggcgtagatcggcgagaagcgcatcggccgcggcgtcaacgtcgggaacgtcaaggctcggtagctccgggccgtcggtctggccgatgtcgaacacgtaaaccgccttgaagaagattccctgttcgaccttgacgccgatcgtgtcgtcggccacttcgcgtttccacaggcaaggcgcgaagatcgtgattcccttcccgcccttccgcacttgccggcccaattcctgccacttgcgatagccggccacttgcgaagcttcgggccgttgcatggcgatgagtagcgaattgtgccatgaatagcggtgaaacttcgcctgaacgtcaaggtaagccttgaacgtgtcggacgcgcgaacgtcatcgacggcccgcgcgagcgcgtcgaggctatcgtcgatgcgcgcccgcaattccctagccttgcccgaaccggtttcctgccggttcccacgttcccagacttgtgttaccgtttccatcgttctagctcccttaaagctaggaccacggccgcgggcggtgacacgtcgcgcggccactttgctaatcgcaccggccaccgcggccggcgcgcacgttccgagcgaagaatcgaagcgcttgcggatgatgcgccctgttggcgcgtttcggcatgtatggtaggcttgcatcgtcaagcgctcttcactagcgtttggccgcggccgcggatgtttgcagcatcgcgcggccacttgtctatcgtcattatgaacgatactcgccccggtgtcaagcgctgacactaaaaaattctacaacgggtccgttgtagcaagaatcgcgtttgcgacggcgcgaacgcacgcgcgcatcatcgcccgcggtttgcgatgcgtttcgggcctgtttttctagcgtttcctgcacgtgccagcgcgtggcatcgcgagtagaatcgttgtccgcgcgtgccatcgaatgtcaccctccgccccgttcgcgtcgattccgccgatgtggcgcgcgtttcgcccgcgtatgggccccgttttcgccacagttttttaacccacgaccgggccgaaatggcgtctacgacgaaggtataaccccctccgccgacacgggactccaaacgcgcaacgcaatcccgaatcatccccccatccggttcgcatcgctgcgcaagactcatcccatcctccccgacgggtcccacgctttctgcaacgagcgatcgcccccaacgcggagtggctttcgcccgtccggagtgccccttctcgcacactgaacgccaagcagcgagtgcaaacgcgaatcgcttctctttatccctgtcgtgcaccgcccggagactcgccctttccgctccgatcgcatcgatcggagcgccgattcgaagctccttcggtgcacataccgactagtcgcgcgacctttcgatgcctggccggggtccggcgcgaggcttttcatcgttccagcagtgccgtgcgcattgctacgtaacgcagcccgaggaaatgaaccgacgaacgccaaacgttcagccgcgagcaccatgtcgccagcggcccgcaagggcacggcaggccgccccgcgctgcggtttgcacaaagtcccacgagtgccgcccggtggccgtagttgtgttatcggacgatcgacggcggagcgggcgggacgttcggccgcgaccgccggcccgcgggcgacaccgtcctgttgctatcgcggtccgtgcgtccgacgggaccggccgacgggccgttcgcgggctgcgggtgtggacaacgcagacggcgtggccgtagagtacggcctgattgggtcggggcagcatggcaggggcatggtccgcggcgcggcaaatgagcggagaagcaggacggccgatcaagccagaccgctttggctccgcctaggtacgcgcagcagaggcggccttctcgccgctgttcctccagcacgcaccgtcgaatcggcccgcgtacctttcgcactctcaggttccaagcgtcaacttggcagcatccgaggccaaccagccgtgcccagggcacgatcatcttcaacctcccccgctacggcgggcgtggaggcttctgccgcggcgtgccgccggcttaaccaggaacggtgacggatgaacttcaatctgctcgaagagcgctggattccggtcctgtacgccaatggccgtttcgggcgcgtcggcattcgcaaggcgctgatcaaggcgggccaagtccgccagatcgccgcgtcgaacccgatggacaatgtcgctctgctgcgctttttgctcgcgttgctctattggtgcaaagggaatccgccgaacgaggggagcgccactacggacgacgtgttccctgcgaagtggctatcgaaacttgacgccaataaggagtgcttcaaccttctcggagtggggaagaggttctatcagtgcgccaattctcgaagctcgaaggtgcctgaaaaactcactgcaaattatctaatccatgaaatccccacaggtacgaacaaatggcactttcgccactcgaccgacaaagtcgacggcttgtgtccggcgtgttgtgctatgggcttgttgcggctgccgttattttccacgtctggcggacgaggcaagccgcctggcgtgaactcgaaaccaccggtctatgtgataccagtaggtgtttcactcgcggaaactctatggttctcgtggcggccaactgcgaatttgggaacgccggcatgggaaaagccggatgctcaacttccgaaggcaggcgagatacccttactgttaggactgacatggttgccgcggcgggtgtggttggagaatccagaggaaaccaaagccgattgcgtctcatgcgggcggagtgagcgcctcattcgtagatgtgtgttttccggtatcgggagcacaaaaacggaagcggccgatccgggtcgtgactggcgcgacccacatgtcatttatgggcaaaaccggaagcgtgatgttatgcccctgcatgccagcaatgctcttggcggctcggatgcggccgcgagtcaatggtcaaagatcgtggctggtattctcggggatcaaaaaacgaatgatagaagcagtctgcgggttgtcggtttttcaacggtgcagaacgacaagtacctagaggcgatggaatacctgatgcctcgcccacatgggactcagaaggatcaagagtctatagccaagtttgagcgatggcagaagcaagccgcaggacttattccaagtcttgttcgtatcgtcaaatcgtcgaaagaaaaggcggggtcccgaaaacataaggagattgcgccaatggtcgccgccgttcgtcctcatgtggaagctaaagtctccaagaaggcaggcgaaattctcgctggtcgcgcaggggcatgggatgaggcggcggcggaatatcgcccgatgatgaagatgctcgctaagtcgctgtccccagggttcaccaccgcagcagtgcatcggcggaaccagatcgtcaacgtgttgcccgatatgcgcacaaaactggtttcggcaaaaaaatccagccggaagaagggagggacaagtgagcgcaacggagcagtacattgacgtcctgacacggctgaaaaccggcgaactcgggctgctgcgcacgcacgccggacaagggcttgatgaatcggtcgatggattcgacctattctccggtctgtggtggccgttgcggcgaaagaatgagcgggcgccgcggcgtccggttgcgtggttgatcgcaaagctctacgccgcctgtcctattgagcattcgcccgacaaaacgattgctcggcaactggcactatgccagccgaccgagaacaaggcgaaggagcgtttccaacaaaggtttgacaggatgctcgccctgccactcgaccgaatcgaaccggcgctgcaatgggcgctggatcgggtagcctcaagcaccgggaaactcgattgggtaaggctgacggatgatctttccatttgggaacgtgaaaccacccgcctcaagtgggcgaaccagtatctccaaaacgacgaaacggtagaaatatgctaatcgagattcatgcgattcagaaccacagcccggccaatttgaaccgggatgacctgggcgcgcccaagacctgctacttcggcgaagtactgcgcttgcgcatctccagccagtgcatcaaacgaagcattcgcatgagcgacgggttcaagctcctgtgcggtggcattcgtacgcgccggttgcctcaacatctcgcgaagcacatcgaagagagggatgtactctcgcttgcccaaagtgtgattcagcactgtggattactagccagcgaagaagagggcaagaaaaagaaaaaggatgtgatcgtctttctatccaaaagcgccgttccagaaatggtgaaactgctgcgcgaagcgccgcaaagtgcgagtcggagtcaggtcgaaaaactcgccgagcaatttgcaaaactgatagcgcaggaacgctgtgctcccgatatggcgctgtcaggtcgaatgctcgagcctgccaagcctccaaagaaaacgaacagaggcaaggccgttgattccagtcaatcagaggatgatgaagacgatgaagatgagaagggcaagaacaccggtgtgtggaaaggacttgactcgaaaatagaggcctcgcttcaggtagctcacgctgtttcgacacatgaagcccgtccggaagtggattactttgtggccgctgatgatatcaagggtgaggacgcaggagcggcctatgtggacgaagcaatgttcgcctcggcctgtttctacaagtatttctcggtcgattgggaacaactggtcaagaatctaaaaggctatggggacaaccacgaaaaactggccgcgcacaccgtcggcgcgttcattcgcggggcggcgacggtgaatcccacgggcaagcagaacagcttcgccgcccacaatccgcccgatggaatgctcatcgaaatcaaggacgcaccgattagctatgccaacgccttcgccaaacccgcagcccatggagatcgcgacatcatctcacagaccattgcccaattgggacaatacgtccacgaccttgacacggggtatggaaagccgcgcgagcgtttttggttttcgcccaacctacggtatccgttgagcattgtagaaaacaaacaggaaatcacgcttgcccaacacaatctcaaatcgctcgacgagttgatccccgccgtgatcaaaaccatcggttatgactggacagaggtgcaaaaagtggtcgtgaacgcggagtcgacctcgtgagcgccaacactctgtttctccgcctcgaaggcccgatgcaggcatggggcgctcacgaatcgaagttcgtcgtccgacggacagccgaagcaccgaccaaatccggagtgatcggtatgatgtgcgcggcgttgggcgtttcccgctccgaagccgccgcagaatggcttccaagactcagcgccatgcgcatgggcgtccgaatcgatgtgccgggtatccgctggtgggactatcacacagtcggcgcagggatgaagatgcgtattgcggaaggcgaggggaagaccaaacccggcgcgatgctcactcggcgcgagtacctttgcgacgccagctttcttgtcgctctgcaaggcgaaccgacactcatagccgaattggaagccgccgttaatagtcccgagtggaccctgtaccttggaagaaagtgctgcccgccgtcacggccattgttggaacatccttcgggcgctctgcccgatttgctttcggcgcttatttcgattccctggcggccaaggctgaaaggaaaccagccgccgaagtccgtggattgtttgctggattgggatgcgacgctccaacagcccgaagcgcccgccgactcgctcgtgtggtacgacgtgccgcaaacgttcgatccgccggcgcatggaccgcgattcgtcatccgcaaggaattgcgcgtgggcgcggacggcgaggtcagcatcacggtgcaacctgcgcaaagccccactccacgaccacttcgcccacgagccgactatggcaacagcgaatacaaaaaacgccgcctgcaacggctcgaccacgaccatcatctgtgcgtcttctgcaaatcgccgggcacgaccgttcagcatgtcacctatcgccacgccggtggggacgaacgcctcgacgagttgcgctcgctctgccgcctctgccacgacgcggtgacgatgatcgaatacggactgggcatggagcgggaccgaatcaatcctgaagacgagcgatggcgcgaccggatcatcactaagcgtgacgagatcatccgttttcgttcgctggaaactcgacggcgacacctgagcctcgaggaggtcgaatagccatgtatctgacgttccttctgatcgacgttggaaacaatcccgaccggccgcgtccgggccgcttgtggttgcgcaaccgataccgtgtccatcagcgtttgtgcatggcattcccttccgatccacgtcggtgcgacgatccggactttctcaagccctacgccccggacgactttgcgcagaaacaggttcacgtgactcgccggacggattccggctttctctttcgcgttgacccgcaaccgagtgggcgggtcgtgattctcgttcaatcagccaccgagccggactggggctacgcctttcacaacgcaggacacctgctcgcggcgccgccggagacgaaaacggtcgagccgcgatttgagcctgggcagcacttgcgtttccgcctgctggccaatccaaccaagcgactccgcaaggattcctctgactcgcccggtcagccggttgatgagaagtgggtcggcaagcgcgtcgccgtgaaatcggatggtcttgagaattggcttacccgtcgcgcgcaacgggccgggttccacgtgaggcaattgtccggcattcaccccggttgcgtttatgtcaacaagggcgagcctctgcggtatcgctccgcgctatacgaaggaattctcgagattaccgatcctggacccttcgggaacacgtttatccacggcatcggccccgccaaggccttcggcttcggcctgctctcgctggccccggtccggtaagcgacacccgccgcgggccacgccgcgccgtcctcacgccggacgcgccgtgggccgatctttgacaagtgcataggcgcatcgcgggcagccaccctccgccacgctgccccggggcaaaaggatcacgctgtggacgatctccgtcagcttccgcggtttggcgacagcctcacctacctctacctcgagcatgcccgcatcgagcagcatgagaaggccgtcgccgcccatgacgcatcgggcctcacgcccgtgccggccgcgtccctggccctgctcatgctcgggccgggtacggccatcacccacgcggccgtcaaggccctggccgacaacaactgcaccgtggcctgggtcggcgaggagggcctgcggttctacgccgcaggcacgggcggcacgcggggcagcgccgggctgctccggcaggcccgcctggtcagccacccgcgtctcaggctcgccgtcgtcatgcggatgtatgtgaagcgattccccggcggactcgatccgggtctgacgctgcaacaaatccgcggcttggagggcatccgcgtgcgcgaagcatatgcgaaagccagcaaggcggcgggcgtcccctggaccggacgcaactacaaacgcggcgactggaacgcggccgaccccgtgaaccgagcgctgtccaccggcaacgcatgcctatacggcttggttcaggcggcgctgctttcggccggctattccccggccctggggttcatccacaccgggaagcaactctcgttcgtgtacgacatcgccgacctctacaaggccgatctggtcgtgcctgcggccttcgaggtcgcggcggccatgagttcgggcgtggaacgccagatgcggatcgcgtgccggcggcggttccgcgacgggcggctcatgcagcgaatcctgccggatatcgccgacctgttcgacctgtcgggcctcccggagctcgtggacgatccggcatgggacgaggagtcgtcctcgcccggagcgctttgggatcccgaggcgggcgggccggcggacgggcgtgctgagggaggggtcaactatggtcctgatcctggttgagcgtgtggccccgtcgctccgcggcgagctgacccgctggctgatccagccgcggaccggcgtgttcgtcggcacggtatcggccctcgtccgcgacaagttatgggaccgggtcgtccacgcggtccaggccgccaagccccgagccggcgggaagcaacgcggggccatgatgatctataccacgaataccgagcagggattcgcgatccgtgtgttcggcgagaccgatcggagcatcgaagacttcgagggcctgttgcttgcaaaaagcccgctcaaggcgtagaaacgtagcgctgtccccacgcacgtgggggtgaaccgccgctgctgtcgagaggggcggaggtgtttccgctgtccccacgcacgtgggggtgaaccgatgtcgctcctcaccgggctgtcgtcggcgagcgctgtccccacgcacgtgggggtgaaccgcttgacgactattcatcgacctgtcaagcgatcgctgtccccacgcacgtgggggtgaaccgcggacgatcagaaccgcgacaggtatggagcgctgtccccacgcacgtgggggtgaaccgcgtggtctcgccaccctcgactcctcgatcccgctgtccccacgcacgtgggggtgaaccaggtggcgatcgccctgcacaaccaggaggtctcgctgtccccacgcacgtgggggtgaaccggctaacgtagagcaaatggcgcttgagttcatcgctgtccccacgcacgtgggggtgaaccgcactctctgagggtgccgtccacgacgcaaacgctgtccccacgcacgtgggggtgaaccggcgggatgtctctccgctacaccccgaagggcgctgtccccacgcacgtgggggtgaaccgggcaacccaggcaagccgatgggtgctgtccacgctgtccccacgcacgtgggggtgaaccagccgtgccgctggtccgctaagcggaaggcgcacgctgtccccacgcacgtgggggtgaaccgctgatggactcgccggctaccgggtcgtagcagctgtccccacgcacgtgggggtgaaccgagccgatgggcatgacgggggtgactgatgtcgctgtccccacgcacgtgggggtgaaccggagctatctgcccttcgcgatgtatcgcaagagctgtccccacgcacgtgggggtgaaccgtcgatttgggatcagctgacgtcggcgctgaccgctgtccccacgcacgtgggggtgaaccgttctcatcgaagagaccgacggcatccgggacgctgtccccacgcacgtgggggtgaaccgacgggattcccgccatgatgcaggcggcaggcgctgtccccacgcacgtgggggtgaaccgattttcggcgaccgaccgccgatcgcctctaaccgctgtccccacgcacgtgggggtgaaccgggagaacggactatgaagacttacactgttggggctgtccccacgcacgtgggggtgaaccgtacgccgatgacaccacaccagttgacaacgtccgctgtccccacgcacgtgggggtgaaccggcgccacgatcaccgtgggtacgtcggtaagcagctgtccccacgcacgtgggggtgaaccgtgagcatcagacgcccgacgcggcggggaaggagctgtccccacgcacgtgggggtgaaccgcggtcagcttcaatccacgacctccaggaagttgctgtccccacgcacgtgggggtgaaccgccgaggccaacgatccggtggagctgcggcggcgctgtccccacgcacgtgggggtgaaccgtcgggcagagaccggccgcaagttttcgctgcgctgtccccacgcacgtgggggtgaaccgcttatgtacgcggaccggtccgccaaccacccgctgtccccacgcacgtgggggtgaaccgcgatggatcgggcaggccgcaccgcacgcaccgctgtccccacgcacgtgggggtgaaccggcgccgcgtgatccgccagcgaagcatcgtacgctgtccccacgcacgtgggggtgaaccgacgaagagaccgcacgtcggcaacgtggggagctgtccccacgcacgtgggggtgaaccggatgcctggatgaactttcgggactggacgcgctgtccccacgcacgtgggggtgaaccggacgagcggcgagcgctcatcgctggctaccgagctgtccccacgcacgtgggggtgaaccggtcgcacggagatctcgccgtcaagctgcgcgctgtccccacgcacgtgggggtgaaccgcagccgttgaccgaggcggtgggcgcggcgctcgctgtccccacgcacgtgggggtgaaccgtttcgatcgctctccgtgctcaaccgtccatacgctgtccccacgcacgtgggggtgaaccggactcctcgtcgaagatgcacccgtgccgatcgctgtccccacgcacgtgggggtgaaccgctcaaggccgtggcgcagagagatcggcccggcgctgtccccacgcacgtgggggtgaaccggcgagttggctcgtcagccgttccggctccaccgctgtccccacgcacgtgggggtgaaccgtcgaagtcggcgagtccggcgagcgattgaagcgttgtccccacgcacgtgggggtgaaccgcaggcgaagtatgtgtggatggtccaggaggtgttgtccccacgcacgtgggggtgaaccgcgtaggggctgtggctgggcggggccaggtacgttgtccccacgcacgtgggggtgaaccgtccaccgctgtcgtgtcaacgacgatcgaggcgttgtccccacgcacgtgggggtgaaccgttaaactcttgttccgagccgctggagctaaccgttgtccccacgcacgtgggggtgaaccgcgttacgtcgagagagggtaagcgtgtgctgagttgtccccacgcacgtgggggtgaaccgtcggcaaggtctcggcgaagatcgtgctcaacgttgtccccacgcacgtgggggtgaaccgccgggttgcagactccgggttcgcacgcacaggcgttgtccccacgcacgtgggggtgaaccggcgatcgtcgcgacgacaacggggggggaagggttgtccccacgcacgtgggggtgaaccggcacggagggacgatccggaagggacgaagggacgttgtccccacgcacgtgggggtgaaccggcggtcagcgagggacaggagctgctgcgtacgttgtccccacgcacgtgggggtgaaccggattccatgcctacctgccgatggccgaataccgttgtccccacgcacgtgggggtgaaccggcggctcggctactctatgtgtcacgggaatcgttgtccccacgcacgtgggggtgaaccgaccgcggctcggggcggagtcgaaaatcttccgttgtccccacgcacgtgggggtgaaccggctatctcgacgaacctcgcaattgcttcggcgttgtccccacgcacgtgggggtgaaccgcgctagaccctgaacaagcgtgattttcgcgcttcgtgcaaaaaaaagctcgaaatgcctcgattctcgcgtaaaacgtgtggtgtcaagaacatggcacgcttacgcaaggaggcatttcgagtgaac

SEQ ID NO: 948 - DNA, 157137 bp, Artificial Sequence
  Synthetic Oligonucleotide
  misc_feature (1)..(36289): n is a, c, g, or t
nnnnnnnnnnnnnnnnnnnnnnnnnnnnnnnnnnnnnnnnnnnnnnnnnnnnnnnnnnnnnnnnnnnnnnnnnnnnnnnnnnnnnnnnnnnnnnnnnnnnnnnnnnnnnnnnnnnnnnnnnnnnnnnnnnnnnnnnnnnnnnnnnnnnnnnnnnnnnnnnnnnnnnnnnnnnnnnnnnnnnnnnnnnnnnnnnnnnnnnnnnnnnnnnnnnnnnnnnnnnnnnnnnnnnnnnnnnnnnnnnnnnnnnnnnnnnnnnnnnnnnnnnnnnnnnnnnnnnnnnnnnnnnnnnnnnnnnnnnnnnnnnnnnnnnnnnnnnnnnnnnnnnnnnnnnnnnnnnnnnnnnnnnnnnnnnnnnnnnnnnnnnnnnnnnnnnnnnnnnnnnnnnnnnnnnnnnnnnnnnnnnnnnnnnnnnnnnnnnnnnnnnnnnnnnnnnnnnnnnnnnnnnnnnnnnnnnnnnnnnnnnnnnnnnnnnnnnnnnnnnnnnnnnnnnnnnnnnnnnnnnnnnnnnnnnnnnnnnnnnnnnnnnnnnnnnnnnnnnnnnnnnnnnnnnnnnnnnnnnnnnnnnnnnnnnnnnnnnnnnnnnnnnnnnnnnnnnnnnnnnnnnnnnnnnnnnnnnnnnnnnnnnnnnnnnnnnnnnnnnnnnnnnnnnnnnnnnnnnnnnnnnnnnnnnnnnnnnnnnnnnnnnnnnnnnnnnnnnnnnnnnnnnnnnnnnnnnnnnnnnnnnnnnnnnnnnnnnnnnnnnnnnnnnnnnnnnnnnnnnnnnnnnnnnnnnnnnnnnnnnnnnnnnnnnnnnnnnnnnnnnnnnnnnnnnnnnnnnnnnnnnnnnnnnnnnnnnnnnnnnnnnnnnnnnnnnnnnnnnnnnnnnnnnnnnnnnnnnnnnnnnnnnnnnnnnnnnnnnnnnnnnnnnnnnnnnnnnnnnnnnnnnnnnnnnnnnnnnnnnnnnnnnnnnnnnnnnnnnnnnnnnnnnnnnnnnnnnnnnnnnnnnnnnnnnnnnnnnnnnnnnnnnnnnnnnnnnnnnnnnnnnnnnnnnnnnnnnnnnnnnnnnnnnnnnnnnnnnnnnnnnnnnnnnnnnnnnnnnnnnnnnnnnnnnnnnnnnnnnnnnnnnnnnnnnnnnnnnnnnnnnnnnnnnnnnnnnnnnnnnnnnnnnnnnnnnnnnnnnnnnnnnnnnnnnnnnnnnnnnnnnnnnnnnnnnnnnnnnnnnnnnnnnnnnnnnnnnnnnnnnnnnnnnnnnnnnnnnnnnnnnnnnnnnnnnnnnnnnnnnnnnnnnnnnnnnnnnnnnnnnnnnnnnnnnnnnnnnnnnnnnnnnnnnnnnnnnnnnnnnnnnnnnnnnnnnnnnnnnnnnnnnnnnnnnnnnnnnnnnnnnnnnnnnnnnnnnnnnnnnnnnnnnnnnnnnnnnnnnnnnnnnnnnnnnnnnnnnnnnnnnnnnnnnnnnnnnnnnnnnnnnnnnnnnnnnnnnnnnnnnnnnnnnnnnnnnnnnnnnnnnnnnnnnnnnnnnnnnnnnnnnnnnnnnnnnnnnnnnnnnnnnnnnnnnnnnnnnnnnnnnnnnnnnnnnnnnnnnnnnnnnnnnnnnnnnnnnnnnnnnnnnnnnnnnnnnnnnnnnnnnnnnnnnnnnnnnnnnnnnnnnnnnnnnnnnnnnnnnnnnnnnnnnnnnnnnnnnnnnnnnnnnnnnnnnnnnnnnnnnnnnnnnnnnnnnnnnnnnnnnnnnnnnnnnnnnnnnnnnnnnnnnnnnnnnnnnnnnnnnnnnnnnnnnnnnnnnnnnnnnnnnnnnnnnnnnnnnnnnnnnnnnnnnnnnnnnnnnnnnnnnnnnnnnnnnnnnnnnnnnnnnnnnnnnnnnnnnnnnnnnnnnnnnnnnnnnnnnnnnnnnnnnnnnnnnnnnnnnnnnnnnnnnnnnnnnnnnnnnnnnnnnnnnnnnnnnnnnnnnnnnnnnnnnnnnnnnnnnnnnnnnnnnnnnnnnnnnnnnnnnnnnnnnnnnnnnnnnnnnnnnnnnnnnnnnnnnnnnnnnnnnnnnnnnnnnnnnnnnnnnnnnnnnnnnnnnnnnnnnnnnnnnnnnnnnnnnnnnnnnnnnnnnnnnnnnnnnnnnnnnnnnnnnnnnnnnnnnnnnnnnnnnnnnnnnnnnnnnnnnnnnnnnnnnnnnnnnnnnnnnnnnnnnnnnnnnnnnnnnnnnnnnnnnnnnnnnnnnnnnnnnnnnnnnnnnnnnnnnnnnnnnnnnnnnnnnnnnnnnnnnnnnnnnnnnnnnnnnnnnnnnnnnnnnnnnnnnnnnnnnnnnnnnnnnnnnnnnnnnnnnnnnnnnnnnnnnnnnnnnnnnnnnnnnnnnnnnnnnnnnnnnnnnnnnnnnnnnnnnnnnnnnnnnnnnnnnnnnnnnnnnnnnnnnnnnnnnnnnnnnnnnnnnnnnnnnnnnnnnnnnnnnnnnnnnnnnnnnnnnnnnnnnnnnnnnnnnnnnnnnnnnnnnnnnnnnnnnnnnnnnnnnnnnnnnnnnnnnnnnnnnnnnnnnnnnnnnnnnnnnnnnnnnnnnnnnnnnnnnnnnnnnnnnnnnnnnnnnnnnnnnnnnnnnnnnnnnnnnnnnnnnnnnnnnnnnnnnnnnnnnnnnnnnnnnnnnnnnnnnnnnnnnnnnnnnnnnnnnnnnnnnnnnnnnnnnnnnnnnnnnnnnnnnnnnnnnnnnnnnnnnnnnnnnnnnnnnnnnnnnnnnnnnnnnnnnnnnnnnnnnnnnnnnnnnnnnnnnnnnnnnnnnnnnnnnnnnnnnnnnnnnnnnnnnnnnnnnnnnnnnnnnnnnnnnnnnnnnnnnnnnnnnnnnnnnnnnnnnnnnnnnnnnnnnnnnnnnnnnnnnnnnnnnnnnnnnnnnnnnnnnnnnnnnnnnnnnnnnnnnnnnnnnnnnnnnnnnnnnnnnnnnnnnnnnnnnnnnnnnnnnnnnnnnnnnnnnnnnnnnnnnnnnnnnnnnnnnnnnnnnnnnnnnnnnnnnnnnnnnnnnnnnnnnnnnnnnnnnnnnnnnnnnnnnnnnnnnnnnnnnnnnnnnnnnnnnnnnnnnnnnnnnnnnnnnnnnnnnnnnnnnnnnnnnnnnnnnnnnnnnnnnnnnnnnnnnnnnnnnnnnnnnnnnnnnnnnnnnnnnnnnnnnnnnnnnnnnnnnnnnnnnnnnnnnnnnnnnnnnnnnnnnnnnnnnnnnnnnnnnnnnnnnnnnnnnnnnnnnnnnnnnnnnnnnnnnnnnnnnnnnnnnnnnnnnnnnnnnnnnnnnnnnnnnnnnnnnnnnnnnnnnnnnnnnnnnnnnnnnnnnnnnnnnnnnnnnnnnnnnnnnnnnnnnnnnnnnnnnnnnnnnnnnnnnnnnnnnnnnnnnnnnnnnnnnnnnnnnnnnnnnnnnnnnnnnnnnnnnnnnnnnnnnnnnnnnnnnnnnnnnnnnnnnnnnnnnnnnnnnnnnnnnnnnnnnnnnnnnnnnnnnnnnnnnnnnnnnnnnnnnnnnnnnnnnnnnnnnnnnnnnnnnnnnnnnnnnnnnnnnnnnnnnnnnnnnnnnnnnnnnnnnnnnnnnnnnnnnnnnnnnnnnnnnnnnnnnnnnnnnnnnnnnnnnnnnnnnnnnnnnnnnnnnnnnnnnnnnnnnnnnnnnnnnnnnnnnnnnnnnnnnnnnnnnnnnnnnnnnnnnnnnnnnnnnnnnnnnnnnnnnnnnnnnnnnnnnnnnnnnnnnnnnnnnnnnnnnnnnnnnnnnnnnnnnnnnnnnnnnnnnnnnnnnnnnnnnnnnnnnnnnnnnnnnnnnnnnnnnnnnnnnnnnnnnnnnnnnnnnnnnnnnnnnnnnnnnnnnnnnnnnnnnnnnnnnnnnnnnnnnnnnnnnnnnnnnnnnnnnnnnnnnnnnnnnnnnnnnnnnnnnnnnnnnnnnnnnnnnnnnnnnnnnnnnnnnnnnnnnnnnnnnnnnnnnnnnnnnnnnnnnnnnnnnnnnnnnnnnnnnnnnnnnnnnnnnnnnnnnnnnnnnnnnnnnnnnnnnnnnnnnnnnnnnnnnnnnnnnnnnnnnnnnnnnnnnnnnnnnnnnnnnnnnnnnnnnnnnnnnnnnnnnnnnnnnnnnnnnnnnnnnnnnnnnnnnnnnnnnnnnnnnnnnnnnnnnnnnnnnnnnnnnnnnnnnnnnnnnnnnnnnnnnnnnnnnnnnnnnnnnnnnnnnnnnnnnnnnnnnnnnnnnnnnnnnnnnnnnnnnnnnnnnnnnnnnnnnnnnnnnnnnnnnnnnnnnnnnnnnnnnnnnnnnnnnnnnnnnnnnnnnnnnnnnnnnnnnnnnnnnnnnnnnnnnnnnnnnnnnnnnnnnnnnnnnnnnnnnnnnnnnnnnnnnnnnnnnnnnnnnnnnnnnnnnnnnnnnnnnnnnnnnnnnnnnnnnnnnnnnnnnnnnnnnnnnnnnnnnnnnnnnnnnnnnnnnnnnnnnnnnnnnnnnnnnnnnnnnnnnnnnnnnnnnnnnnnnnnnnnnnnnnnnnnnnnnnnnnnnnnnnnnnnnnnnnnnnnnnnnnnnnnnnnnnnnnnnnnnnnnnnnnnnnnnnnnnnnnnnnnnnnnnnnnnnnnnnnnnnnnnnnnnnnnnnnnnnnnnnnnnnnnnnnnnnnnnnnnnnnnnnnnnnnnnnnnnnnnnnnnnnnnnnnnnnnnnnnnnnnnnnnnnnnnnnnnnnnnnnnnnnnnnnnnnnnnnnnnnnnnnnnnnnnnnnnnnnnnnnnnnnnnnnnnnnnnnnnnnnnnnnnnnnnnnnnnnnnnnnnnnnnnnnnnnnnnnnnnnnnnnnnnnnnnnnnnnnnnnnnnnnnnnnnnnnnnnnnnnnnnnnnnnnnnnnnnnnnnnnnnnnnnnnnnnnnnnnnnnnnnnnnnnnnnnnnnnnnnnnnnnnnnnnnnnnnnnnnnnnnnnnnnnnnnnnnnnnnnnnnnnnnnnnnnnnnnnnnnnnnnnnnnnnnnnnnnnnnnnnnnnnnnnnnnnnnnnnnnnnnnnnnnnnnnnnnnnnnnnnnnnnnnnnnnnnnnnnnnnnnnnnnnnnnnnnnnnnnnnnnnnnnnnnnnnnnnnnnnnnnnnnnnnnnnnnnnnnnnnnnnnnnnnnnnnnnnnnnnnnnnnnnnnnnnnnnnnnnnnnnnnnnnnnnnnnnnnnnnnnnnnnnnnnnnnnnnnnnnnnnnnnnnnnnnnnnnnnnnnnnnnnnnnnnnnnnnnnnnnnnnnnnnnnnnnnnnnnnnnnnnnnnnnnnnnnnnnnnnnnnnnnnnnnnnnnnnnnnnnnnnnnnnnnnnnnnnnnnnnnnnnnnnnnnnnnnnnnnnnnnnnnnnnnnnnnnnnnnnnnnnnnnnnnnnnnnnnnnnnnnnnnnnnnnnnnnnnnnnnnnnnnnnnnnnnnnnnnnnnnnnnnnnnnnnnnnnnnnnnnnnnnnnnnnnnnnnnnnnnnnnnnnnnnnnnnnnnnnnnnnnnnnnnnnnnnnnnnnnnnnnnnnnnnnnnnnnnnnnnnnnnnnnnnnnnnnnnnnnnnnnnnnnnnnnnnnnnnnnnnnnnnnnnnnnnnnnnnnnnnnnnnnnnnnnnnnnnnnnnnnnnnnnnnnnnnnnnnnnnnnnnnnnnnnnnnnnnnnnnnnnnnnnnnnnnnnnnnnnnnnnnnnnnnnnnnnnnnnnnnnnnnnnnnnnnnnnnnnnnnnnnnnnnnnnnnnnnnnnnnnnnnnnnnnnnnnnnnnnnnnnnnnnnnnnnnnnnnnnnnnnnnnnnnnnnnnnnnnnnnnnnnnnnnnnnnnnnnnnnnnnnnnnnnnnnnnnnnnnnnnnnnnnnnnnnnnnnnnnnnnnnnnnnnnnnnnnnnnnnnnnnnnnnnnnnnnnnnnnnnnnnnnnnnnnnnnnnnnnnnnnnnnnnnnnnnnnnnnnnnnnnnnnnnnnnnnnnnnnnnnnnnnnnnnnnnnnnnnnnnnnnnnnnnnnnnnnnnnnnnnnnnnnnnnnnnnnnnnnnnnnnnnnnnnnnnnnnnnnnnnnnnnnnnnnnnnnnnnnnnnnnnnnnnnnnnnnnnnnnnnnnnnnnnnnnnnnnnnnnnnnnnnnnnnnnnnnnnnnnnnnnnnnnnnnnnnnnnnnnnnnnnnnnnnnnnnnnnnnnnnnnnnnnnnnnnnnnnnnnnnnnnnnnnnnnnnnnnnnnnnnnnnnnnnnnnnnnnnnnnnnnnnnnnnnnnnnnnnnnnnnnnnnnnnnnnnnnnnnnnnnnnnnnnnnnnnnnnnnnnnnnnnnnnnnnnnnnnnnnnnnnnnnnnnnnnnnnnnnnnnnnnnnnnnnnnnnnnnnnnnnnnnnnnnnnnnnnnnnnnnnnnnnnnnnnnnnnnnnnnnnnnnnnnnnnnnnnnnnnnnnnnnnnnnnnnnnnnnnnnnnnnnnnnnnnnnnnnnnnnnnnnnnnnnnnnnnnnnnnnnnnnnnnnnnnnnnnnnnnnnnnnnnnnnnnnnnnnnnnnnnnnnnnnnnnnnnnnnnnnnnnnnnnnnnnnnnnnnnnnnnnnnnnnnnnnnnnnnnnnnnnnnnnnnnnnnnnnnnnnnnnnnnnnnnnnnnnnnnnnnnnnnnnnnnnnnnnnnnnnnnnnnnnnnnnnnnnnnnnnnnnnnnnnnnnnnnnnnnnnnnnnnnnnnnnnnnnnnnnnnnnnnnnnnnnnnnnnnnnnnnnnnnnnnnnnnnnnnnnnnnnnnnnnnnnnnnnnnnnnnnnnnnnnnnnnnnnnnnnnnnnnnnnnnnnnnnnnnnnnnnnnnnnnnnnnnnnnnnnnnnnnnnnnnnnnnnnnnnnnnnnnnnnnnnnnnnnnnnnnnnnnnnnnnnnnnnnnnnnnnnnnnnnnnnnnnnnnnnnnnnnnnnnnnnnnnnnnnnnnnnnnnnnnnnnnnnnnnnnnnnnnnnnnnnnnnnnnnnnnnnnnnnnnnnnnnnnnnnnnnnnnnnnnnnnnnnnnnnnnnnnnnnnnnnnnnnnnnnnnnnnnnnnnnnnnnnnnnnnnnnnnnnnnnnnnnnnnnnnnnnnnnnnnnnnnnnnnnnnnnnnnnnnnnnnnnnnnnnnnnnnnnnnnnnnnnnnnnnnnnnnnnnnnnnnnnnnnnnnnnnnnnnnnnnnnnnnnnnnnnnnnnnnnnnnnnnnnnnnnnnnnnnnnnnnnnnnnnnnnnnnnnnnnnnnnnnnnnnnnnnnnnnnnnnnnnnnnnnnnnnnnnnnnnnnnnnnnnnnnnnnnnnnnnnnnnnnnnnnnnnnnnnnnnnnnnnnnnnnnnnnnnnnnnnnnnnnnnnnnnnnnnnnnnnnnnnnnnnnnnnnnnnnnnnnnnnnnnnnnnnnnnnnnnnnnnnnnnnnnnnnnnnnnnnnnnnnnnnnnnnnnnnnnnnnnnnnnnnnnnnnnnnnnnnnnnnnnnnnnnnnnnnnnnnnnnnnnnnnnnnnnnnnnnnnnnnnnnnnnnnnnnnnnnnnnnnnnnnnnnnnnnnnnnnnnnnnnnnnnnnnnnnnnnnnnnnnnnnnnnnnnnnnnnnnnnnnnnnnnnnnnnnnnnnnnnnnnnnnnnnnnnnnnnnnnnnnnnnnnnnnnnnnnnnnnnnnnnnnnnnnnnnnnnnnnnnnnnnnnnnnnnnnnnnnnnnnnnnnnnnnnnnnnnnnnnnnnnnnnnnnnnnnnnnnnnnnnnnnnnnnnnnnnnnnnnnnnnnnnnnnnnnnnnnnnnnnnnnnnnnnnnnnnnnnnnnnnnnnnnnnnnnnnnnnnnnnnnnnnnnnnnnnnnnnnnnnnnnnnnnnnnnnnnnnnnnnnnnnnnnnnnnnnnnnnnnnnnnnnnnnnnnnnnnnnnnnnnnnnnnnnnnnnnnnnnnnnnnnnnnnnnnnnnnnnnnnnnnnnnnnnnnnnnnnnnnnnnnnnnnnnnnnnnnnnnnnnnnnnnnnnnnnnnnnnnnnnnnnnnnnnnnnnnnnnnnnnnnnnnnnnnnnnnnnnnnnnnnnnnnnnnnnnnnnnnnnnnnnnnnnnnnnnnnnnnnnnnnnnnnnnnnnnnnnnnnnnnnnnnnnnnnnnnnnnnnnnnnnnnnnnnnnnnnnnnnnnnnnnnnnnnnnnnnnnnnnnnnnnnnnnnnnnnnnnnnnnnnnnnnnnnnnnnnnnnnnnnnnnnnnnnnnnnnnnnnnnnnnnnnnnnnnnnnnnnnnnnnnnnnnnnnnnnnnnnnnnnnnnnnnnnnnnnnnnnnnnnnnnnnnnnnnnnnnnnnnnnnnnnnnnnnnnnnnnnnnnnnnnnnnnnnnnnnnnnnnnnnnnnnnnnnnnnnnnnnnnnnnnnnnnnnnnnnnnnnnnnnnnnnnnnnnnnnnnnnnnnnnnnnnnnnnnnnnnnnnnnnnnnnnnnnnnnnnnnnnnnnnnnnnnnnnnnnnnnnnnnnnnnnnnnnnnnnnnnnnnnnnnnnnnnnnnnnnnnnnnnnnnnnnnnnnnnnnnnnnnnnnnnnnnnnnnnnnnnnnnnnnnnnnnnnnnnnnnnnnnnnnnnnnnnnnnnnnnnnnnnnnnnnnnnnnnnnnnnnnnnnnnnnnnnnnnnnnnnnnnnnnnnnnnnnnnnnnnnnnnnnnnnnnnnnnnnnnnnnnnnnnnnnnnnnnnnnnnnnnnnnnnnnnnnnnnnnnnnnnnnnnnnnnnnnnnnnnnnnnnnnnnnnnnnnnnnnnnnnnnnnnnnnnnnnnnnnnnnnnnnnnnnnnnnnnnnnnnnnnnnnnnnnnnnnnnnnnnnnnnnnnnnnnnnnnnnnnnnnnnnnnnnnnnnnnnnnnnnnnnnnnnnnnnnnnnnnnnnnnnnnnnnnnnnnnnnnnnnnnnnnnnnnnnnnnnnnnnnnnnnnnnnnnnnnnnnnnnnnnnnnnnnnnnnnnnnnnnnnnnnnnnnnnnnnnnnnnnnnnnnnnnnnnnnnnnnnnnnnnnnnnnnnnnnnnnnnnnnnnnnnnnnnnnnnnnnnnnnnnnnnnnnnnnnnnnnnnnnnnnnnnnnnnnnnnnnnnnnnnnnnnnnnnnnnnnnnnnnnnnnnnnnnnnnnnnnnnnnnnnnnnnnnnnnnnnnnnnnnnnnnnnnnnnnnnnnnnnnnnnnnnnnnnnnnnnnnnnnnnnnnnnnnnnnnnnnnnnnnnnnnnnnnnnnnnnnnnnnnnnnnnnnnnnnnnnnnnnnnnnnnnnnnnnnnnnnnnnnnnnnnnnnnnnnnnnnnnnnnnnnnnnnnnnnnnnnnnnnnnnnnnnnnnnnnnnnnnnnnnnnnnnnnnnnnnnnnnnnnnnnnnnnnnnnnnnnnnnnnnnnnnnnnnnnnnnnnnnnnnnnnnnnnnnnnnnnnnnnnnnnnnnnnnnnnnnnnnnnnnnnnnnnnnnnnnnnnnnnnnnnnnnnnnnnnnnnnnnnnnnnnnnnnnnnnnnnnnnnnnnnnnnnnnnnnnnnnnnnnnnnnnnnnnnnnnnnnnnnnnnnnnnnnnnnnnnnnnnnnnnnnnnnnnnnnnnnnnnnnnnnnnnnnnnnnnnnnnnnnnnnnnnnnnnnnnnnnnnnnnnnnnnnnnnnnnnnnnnnnnnnnnnnnnnnnnnnnnnnnnnnnnnnnnnnnnnnnnnnnnnnnnnnnnnnnnnnnnnnnnnnnnnnnnnnnnnnnnnnnnnnnnnnnnnnnnnnnnnnnnnnnnnnnnnnnnnnnnnnnnnnnnnnnnnnnnnnnnnnnnnnnnnnnnnnnnnnnnnnnnnnnnnnnnnnnnnnnnnnnnnnnnnnnnnnnnnnnnnnnnnnnnnnnnnnnnnnnnnnnnnnnnnnnnnnnnnnnnnnnnnnnnnnnnnnnnnnnnnnnnnnnnnnnnnnnnnnnnnnnnnnnnnnnnnnnnnnnnnnnnnnnnnnnnnnnnnnnnnnnnnnnnnnnnnnnnnnnnnnnnnnnnnnnnnnnnnnnnnnnnnnnnnnnnnnnnnnnnnnnnnnnnnnnnnnnnnnnnnnnnnnnnnnnnnnnnnnnnnnnnnnnnnnnnnnnnnnnnnnnnnnnnnnnnnnnnnnnnnnnnnnnnnnnnnnnnnnnnnnnnnnnnnnnnnnnnnnnnnnnnnnnnnnnnnnnnnnnnnnnnnnnnnnnnnnnnnnnnnnnnnnnnnnnnnnnnnnnnnnnnnnnnnnnnnnnnnnnnnnnnnnnnnnnnnnnnnnnnnnnnnnnnnnnnnnnnnnnnnnnnnnnnnnnnnnnnnnnnnnnnnnnnnnnnnnnnnnnnnnnnnnnnnnnnnnnnnnnnnnnnnnnnnnnnnnnnnnnnnnnnnnnnnnnnnnnnnnnnnnnnnnnnnnnnnnnnnnnnnnnnnnnnnnnnnnnnnnnnnnnnnnnnnnnnnnnnnnnnnnnnnnnnnnnnnnnnnnnnnnnnnnnnnnnnnnnnnnnnnnnnnnnnnnnnnnnnnnnnnnnnnnnnnnnnnnnnnnnnnnnnnnnnnnnnnnnnnnnnnnnnnnnnnnnnnnnnnnnnnnnnnnnnnnnnnnnnnnnnnnnnnnnnnnnnnnnnnnnnnnnnnnnnnnnnnnnnnnnnnnnnnnnnnnnnnnnnnnnnnnnnnnnnnnnnnnnnnnnnnnnnnnnnnnnnnnnnnnnnnnnnnnnnnnnnnnnnnnnnnnnnnnnnnnnnnnnnnnnnnnnnnnnnnnnnnnnnnnnnnnnnnnnnnnnnnnnnnnnnnnnnnnnnnnnnnnnnnnnnnnnnnnnnnnnnnnnnnnnnnnnnnnnnnnnnnnnnnnnnnnnnnnnnnnnnnnnnnnnnnnnnnnnnnnnnnnnnnnnnnnnnnnnnnnnnnnnnnnnnnnnnnnnnnnnnnnnnnnnnnnnnnnnnnnnnnnnnnnnnnnnnnnnnnnnnnnnnnnnnnnnnnnnnnnnnnnnnnnnnnnnnnnnnnnnnnnnnnnnnnnnnnnnnnnnnnnnnnnnnnnnnnnnnnnnnnnnnnnnnnnnnnnnnnnnnnnnnnnnnnnnnnnnnnnnnnnnnnnnnnnnnnnnnnnnnnnnnnnnnnnnnnnnnnnnnnnnnnnnnnnnnnnnnnnnnnnnnnnnnnnnnnnnnnnnnnnnnnnnnnnnnnnnnnnnnnnnnnnnnnnnnnnnnnnnnnnnnnnnnnnnnnnnnnnnnnnnnnnnnnnnnnnnnnnnnnnnnnnnnnnnnnnnnnnnnnnnnnnnnnnnnnnnnnnnnnnnnnnnnnnnnnnnnnnnnnnnnnnnnnnnnnnnnnnnnnnnnnnnnnnnnnnnnnnnnnnnnnnnnnnnnnnnnnnnnnnnnnnnnnnnnnnnnnnnnnnnnnnnnnnnnnnnnnnnnnnnnnnnnnnnnnnnnnnnnnnnnnnnnnnnnnnnnnnnnnnnnnnnnnnnnnnnnnnnnnnnnnnnnnnnnnnnnnnnnnnnnnnnnnnnnnnnnnnnnnnnnnnnnnnnnnnnnnnnnnnnnnnnnnnnnnnnnnnnnnnnnnnnnnnnnnnnnnnnnnnnnnnnnnnnnnnnnnnnnnnnnnnnnnnnnnnnnnnnnnnnnnnnnnnnnnnnnnnnnnnnnnnnnnnnnnnnnnnnnnnnnnnnnnnnnnnnnnnnnnnnnnnnnnnnnnnnnnnnnnnnnnnnnnnnnnnnnnnnnnnnnnnnnnnnnnnnnnnnnnnnnnnnnnnnnnnnnnnnnnnnnnnnnnnnnnnnnnnnnnnnnnnnnnnnnnnnnnnnnnnnnnnnnnnnnnnnnnnnnnnnnnnnnnnnnnnnnnnnnnnnnnnnnnnnnnnnnnnnnnnnnnnnnnnnnnnnnnnnnnnnnnnnnnnnnnnnnnnnnnnnnnnnnnnnnnnnnnnnnnnnnnnnnnnnnnnnnnnnnnnnnnnnnnnnnnnnnnnnnnnnnnnnnnnnnnnnnnnnnnnnnnnnnnnnnnnnnnnnnnnnnnnnnnnnnnnnnnnnnnnnnnnnnnnnnnnnnnnnnnnnnnnnnnnnnnnnnnnnnnnnnnnnnnnnnnnnnnnnnnnnnnnnnnnnnnnnnnnnnnnnnnnnnnnnnnnnnnnnnnnnnnnnnnnnnnnnnnnnnnnnnnnnnnnnnnnnnnnnnnnnnnnnnnnnnnnnnnnnnnnnnnnnnnnnnnnnnnnnnnnnnnnnnnnnnnnnnnnnnnnnnnnnnnnnnnnnnnnnnnnnnnnnnnnnnnnnnnnnnnnnnnnnnnnnnnnnnnnnnnnnnnnnnnnnnnnnnnnnnnnnnnnnnnnnnnnnnnnnnnnnnnnnnnnnnnnnnnnnnnnnnnnnnnnnnnnnnnnnnnnnnnnnnnnnnnnnnnnnnnnnnnnnnnnnnnnnnnnnnnnnnnnnnnnnnnnnnnnnnnnnnnnnnnnnnnnnnnnnnnnnnnnnnnnnnnnnnnnnnnnnnnnnnnnnnnnnnnnnnnnnnnnnnnnnnnnnnnnnnnnnnnnnnnnnnnnnnnnnnnnnnnnnnnnnnnnnnnnnnnnnnnnnnnnnnnnnnnnnnnnnnnnnnnnnnnnnnnnnnnnnnnnnnnnnnnnnnnnnnnnnnnnnnnnnnnnnnnnnnnnnnnnnnnnnnnnnnnnnnnnnnnnnnnnnnnnnnnnnnnnnnnnnnnnnnnnnnnnnnnnnnnnnnnnnnnnnnnnnnnnnnnnnnnnnnnnnnnnnnnnnnnnnnnnnnnnnnnnnnnnnnnnnnnnnnnnnnnnnnnnnnnnnnnnnnnnnnnnnnnnnnnnnnnnnnnnnnnnnnnnnnnnnnnnnnnnnnnnnnnnnnnnnnnnnnnnnnnnnnnnnnnnnnnnnnnnnnnnnnnnnnnnnnnnnnnnnnnnnnnnnnnnnnnnnnnnnnnnnnnnnnnnnnnnnnnnnnnnnnnnnnnnnnnnnnnnnnnnnnnnnnnnnnnnnnnnnnnnnnnnnnnnnnnnnnnnnnnnnnnnnnnnnnnnnnnnnnnnnnnnnnnnnnnnnnnnnnnnnnnnnnnnnnnnnnnnnnnnnnnnnnnnnnnnnnnnnnnnnnnnnnnnnnnnnnnnnnnnnnnnnnnnnnnnnnnnnnnnnnnnnnnnnnnnnnnnnnnnnnnnnnnnnnnnnnnnnnnnnnnnnnnnnnnnnnnnnnnnnnnnnnnnnnnnnnnnnnnnnnnnnnnnnnnnnnnnnnnnnnnnnnnnnnnnnnnnnnnnnnnnnnnnnnnnnnnnnnnnnnnnnnnnnnnnnnnnnnnnnnnnnnnnnnnnnnnnnnnnnnnnnnnnnnnnnnnnnnnnnnnnnnnnnnnnnnnnnnnnnnnnnnnnnnnnnnnnnnnnnnnnnnnnnnnnnnnnnnnnnnnnnnnnnnnnnnnnnnnnnnnnnnnnnnnnnnnnnnnnnnnnnnnnnnnnnnnnnnnnnnnnnnnnnnnnnnnnnnnnnnnnnnnnnnnnnnnnnnnnnnnnnnnnnnnnnnnnnnnnnnnnnnnnnnnnnnnnnnnnnnnnnnnnnnnnnnnnnnnnnnnnnnnnnnnnnnnnnnnnnnnnnnnnnnnnnnnnnnnnnnnnnnnnnnnnnnnnnnnnnnnnnnnnnnnnnnnnnnnnnnnnnnnnnnnnnnnnnnnnnnnnnnnnnnnnnnnnnnnnnnnnnnnnnnnnnnnnnnnnnnnnnnnnnnnnnnnnnnnnnnnnnnnnnnnnnnnnnnnnnnnnnnnnnnnnnnnnnnnnnnnnnnnnnnnnnnnnnnnnnnnnnnnnnnnnnnnnnnnnnnnnnnnnnnnnnnnnnnnnnnnnnnnnnnnnnnnnnnnnnnnnnnnnnnnnnnnnnnnnnnnnnnnnnnnnnnnnnnnnnnnnnnnnnnnnnnnnnnnnnnnnnnnnnnnnnnnnnnnnnnnnnnnnnnnnnnnnnnnnnnnnnnnnnnnnnnnnnnnnnnnnnnnnnnnnnnnnnnnnnnnnnnnnnnnnnnnnnnnnnnnnnnnnnnnnnnnnnnnnnnnnnnnnnnnnnnnnnnnnnnnnnnnnnnnnnnnnnnnnnnnnnnnnnnnnnnnnnnnnnnnnnnnnnnnnnnnnnnnnnnnnnnnnnnnnnnnnnnnnnnnnnnnnnnnnnnnnnnnnnnnnnnnnnnnnnnnnnnnnnnnnnnnnnnnnnnnnnnnnnnnnnnnnnnnnnnnnnnnnnnnnnnnnnnnnnnnnnnnnnnnnnnnnnnnnnnnnnnnnnnnnnnnnnnnnnnnnnnnnnnnnnnnnnnnnnnnnnnnnnnnnnnnnnnnnnnnnnnnnnnnnnnnnnnnnnnnnnnnnnnnnnnnnnnnnnnnnnnnnnnnnnnnnnnnnnnnnnnnnnnnnnnnnnnnnnnnnnnnnnnnnnnnnnnnnnnnnnnnnnnnnnnnnnnnnnnnnnnnnnnnnnnnnnnnnnnnnnnnnnnnnnnnnnnnnnnnnnnnnnnnnnnnnnnnnnnnnnnnnnnnnnnnnnnnnnnnnnnnnnnnnnnnnnnnnnnnnnnnnnnnnnnnnnnnnnnnnnnnnnnnnnnnnnnnnnnnnnnnnnnnnnnnnnnnnnnnnnnnnnnnnnnnnnnnnnnnnnnnnnnnnnnnnnnnnnnnnnnnnnnnnnnnnnnnnnnnnnnnnnnnnnnnnnnnnnnnnnnnnnnnnnnnnnnnnnnnnnnnnnnnnnnnnnnnnnnnnnnnnnnnnnnnnnnnnnnnnnnnnnnnnnnnnnnnnnnnnnnnnnnnnnnnnnnnnnnnnnnnnnnnnnnnnnnnnnnnnnnnnnnnnnnnnnnnnnnnnnnnnnnnnnnnnnnnnnnnnnnnnnnnnnnnnnnnnnnnnnnnnnnnnnnnnnnnnnnnnnnnnnnnnnnnnnnnnnnnnnnnnnnnnnnnnnnnnnnnnnnnnnnnnnnnnnnnnnnnnnnnnnnnnnnnnnnnnnnnnnnnnnnnnnnnnnnnnnnnnnnnnnnnnnnnnnnnnnnnnnnnnnnnnnnnnnnnnnnnnnnnnnnnnnnnnnnnnnnnnnnnnnnnnnnnnnnnnnnnnnnnnnnnnnnnnnnnnnnnnnnnnnnnnnnnnnnnnnnnnnnnnnnnnnnnnnnnnnnnnnnnnnnnnnnnnnnnnnnnnnnnnnnnnnnnnnnnnnnnnnnnnnnnnnnnnnnnnnnnnnnnnnnnnnnnnnnnnnnnnnnnnnnnnnnnnnnnnnnnnnnnnnnnnnnnnnnnnnnnnnnnnnnnnnnnnnnnnnnnnnnnnnnnnnnnnnnnnnnnnnnnnnnnnnnnnnnnnnnnnnnnnnnnnnnnnnnnnnnnnnnnnnnnnnnnnnnnnnnnnnnnnnnnnnnnnnnnnnnnnnnnnnnnnnnnnnnnnnnnnnnnnnnnnnnnnnnnnnnnnnnnnnnnnnnnnnnnnnnnnnnnnnnnnnnnnnnnnnnnnnnnnnnnnnnnnnnnnnnnnnnnnnnnnnnnnnnnnnnnnnnnnnnnnnnnnnnnnnnnnnnnnnnnnnnnnnnnnnnnnnnnnnnnnnnnnnnnnnnnnnnnnnnnnnnnnnnnnnnnnnnnnnnnnnnnnnnnnnnnnnnnnnnnnnnnnnnnnnnnnnnnnnnnnnnnnnnnnnnnnnnnnnnnnnnnnnnnnnnnnnnnnnnnnnnnnnnnnnnnnnnnnnnnnnnnnnnnnnnnnnnnnnnnnnnnnnnnnnnnnnnnnnnnnnnnnnnnnnnnnnnnnnnnnnnnnnnnnnnnnnnnnnnnnnnnnnnnnnnnnnnnnnnnnnnnnnnnnnnnnnnnnnnnnnnnnnnnnnnnnnnnnnnnnnnnnnnnnnnnnnnnnnnnnnnnnnnnnnnnnnnnnnnnnnnnnnnnnnnnnnnnnnnnnnnnnnnnnnnnnnnnnnnnnnnnnnnnnnnnnnnnnnnnnnnnnnnnnnnnnnnnnnnnnnnnnnnnnnnnnnnnnnnnnnnnnnnnnnnnnnnnnnnnnnnnnnnnnnnnnnnnnnnnnnnnnnnnnnnnnnnnnnnnnnnnnnnnnnnnnnnnnnnnnnnnnnnnnnnnnnnnnnnnnnnnnnnnnnnnnnnnnnnnnnnnnnnnnnnnnnnnnnnnnnnnnnnnnnnnnnnnnnnnnnnnnnnnnnnnnnnnnnnnnnnnnnnnnnnnnnnnnnnnnnnnnnnnnnnnnnnnnnnnnnnnnnnnnnnnnnnnnnnnnnnnnnnnnnnnnnnnnnnnnnnnnnnnnnnnnnnnnnnnnnnnnnnnnnnnnnnnnnnnnnnnnnnnnnnnnnnnnnnnnnnnnnnnnnnnnnnnnnnnnnnnnnnnnnnnnnnnnnnnnnnnnnnnnnnnnnnnnnnnnnnnnnnnnnnnnnnnnnnnnnnnnnnnnnnnnnnnnnnnnnnnnnnnnnnnnnnnnnnnnnnnnnnnnnnnnnnnnnnnnnnnnnnnnnnnnnnnnnnnnnnnnnnnnnnnnnnnnnnnnnnnnnnnnnnnnnnnnnnnnnnnnnnnnnnnnnnnnnnnnnnnnnnnnnnnnnnnnnnnnnnnnnnnnnnnnnnnnnnnnnnnnnnnnnnnnnnnnnnnnnnnnnnnnnnnnnnnnnnnnnnnnnnnnnnnnnnnnnnnnnnnnnnnnnnnnnnnnnnnnnnnnnnnnnnnnnnnnnnnnnnnnnnnnnnnnnnnnnnnnnnnnnnnnnnnnnnnnnnnnnnnnnnnnnnnnnnnnnnnnnnnnnnnnnnnnnnnnnnnnnnnnnnnnnnnnnnnnnnnnnnnnnnnnnnnnnnnnnnnnnnnnnnnnnnnnnnnnnnnnnnnnnnnnnnnnnnnnnnnnnnnnnnnnnnnnnnnnnnnnnnnnnnnnnnnnnnnnnnnnnnnnnnnnnnnnnnnnnnnnnnnnnnnnnnnnnnnnnnnnnnnnnnnnnnnnnnnnnnnnnnnnnnnnnnnnnnnnnnnnnnnnnnnnnnnnnnnnnnnnnnnnnnnnnnnnnnnnnnnnnnnnnnnnnnnnnnnnnnnnnnnnnnnnnnnnnnnnnnnnnnnnnnnnnnnnnnnnnnnnnnnnnnnnnnnnnnnnnnnnnnnnnnnnnnnnnnnnnnnnnnnnnnnnnnnnnnnnnnnnnnnnnnnnnnnnnnnnnnnnnnnnnnnnnnnnnnnnnnnnnnnnnnnnnnnnnnnnnnnnnnnnnnnnnnnnnnnnnnnnnnnnnnnnnnnnnnnnnnnnnnnnnnnnnnnnnnnnnnnnnnnnnnnnnnnnnnnnnnnnnnnnnnnnnnnnnnnnnnnnnnnnnnnnnnnnnnnnnnnnnnnnnnnnnnnnnnnnnnnnnnnnnnnnnnnnnnnnnnnnnnnnnnnnnnnnnnnnnnnnnnnnnnnnnnnnnnnnnnnnnnnnnnnnnnnnnnnnnnnnnnnnnnnnnnnnnnnnnnnnnnnnnnnnnnnnnnnnnnnnnnnnnnnnnnnnnnnnnnnnnnnnnnnnnnnnnnnnnnnnnnnnnnnnnnnnnnnnnnnnnnnnnnnnnnnnnnnnnnnnnnnnnnnnnnnnnnnnnnnnnnnnnnnnnnnnnnnnnnnnnnnnnnnnnnnnnnnnnnnnnnnnnnnnnnnnnnnnnnnnnnnnnnnnnnnnnnnnnnnnnnnnnnnnnnnnnnnnnnnnnnnnnnnnnnnnnnnnnnnnnnnnnnnnnnnnnnnnnnnnnnnnnnnnnnnnnnnnnnnnnnnnnnnnnnnnnnnnnnnnnnnnnnnnnnnnnnnnnnnnnnnnnnnnnnnnnnnnnnnnnnnnnnnnnnnnnnnnnnnnnnnnnnnnnnnnnnnnnnnnnnnnnnnnnnnnnnnnnnnnnnnnnnnnnnnnnnnnnnnnnnnnnnnnnnnnnnnnnnnnnnnnnnnnnnnnnnnnnnnnnnnnnnnnnnnnnnnnnnnnnnnnnnnnnnnnnnnnnnnnnnnnnnnnnnnnnnnnnnnnnnnnnnnnnnnnnnnnnnnnnnnnnnnnnnnnnnnnnnnnnnnnnnnnnnnnnnnnnnnnnnnnnnnnnnnnnnnnnnnnnnnnnnnnnnnnnnnnnnnnnnnnnnnnnnnnnnnnnnnnnnnnnnnnnnnnnnnnnnnnnnnnnnnnnnnnnnnnnnnnnnnnnnnnnnnnnnnnnnnnnnnnnnnnnnnnnnnnnnnnnnnnnnnnnnnnnnnnnnnnnnnnnnnnnnnnnnnnnnnnnnnnnnnnnnnnnnnnnnnnnnnnnnnnnnnnnnnnnnnnnnnnnnnnnnnnnnnnnnnnnnnnnnnnnnnnnnnnnnnnnnnnnnnnnnnnnnnnnnnnnnnnnnnnnnnnnnnnnnnnnnnnnnnnnnnnnnnnnnnnnnnnnnnnnnnnnnnnnnnnnnnnnnnnnnnnnnnnnnnnnnnnnnnnnnnnnnnnnnnnnnnnnnnnnnnnnnnnnnnnnnnnnnnnnnnnnnnnnnnnnnnnnnnnnnnnnnnnnnnnnnnnnnnnnnnnnnnnnnnnnnnnnnnnnnnnnnnnnnnnnnnnnnnnnnnnnnnnnnnnnnnnnnnnnnnnnnnnnnnnnnnnnnnnnnnnnnnnnnnnnnnnnnnnnnnnnnnnnnnnnnnnnnnnnnnnnnnnnnnnnnnnnnnnnnnnnnnnnnnnnnnnnnnnnnnnnnnnnnnnnnnnnnnnnnnnnnnnnnnnnnnnnnnnnnnnnnnnnnnnnnnnnnnnnnnnnnnnnnnnnnnnnnnnnnnnnnnnnnnnnnnnnnnnnnnnnnnnnnnnnnnnnnnnnnnnnnnnnnnnnnnnnnnnnnnnnnnnnnnnnnnnnnnnnnnnnnnnnnnnnnnnnnnnnnnnnnnnnnnnnnnnnnnnnnnnnnnnnnnnnnnnnnnnnnnnnnnnnnnnnnnnnnnnnnnnnnnnnnnnnnnnnnnnnnnnnnnnnnnnnnnnnnnnnnnnnnnnnnnnnnnnnnnnnnnnnnnnnnnnnnnnnnnnnnnnnnnnnnnnnnnnnnnnnnnnnnnnnnnnnnnnnnnnnnnnnnnnnnnnnnnnnnnnnnnnnnnnnnnnnnnnnnnnnnnnnnnnnnnnnnnnnnnnnnnnnnnnnnnnnnnnnnnnnnnnnnnnnnnnnnnnnnnnnnnnnnnnnnnnnnnnnnnnnnnnnnnnnnnnnnnnnnnnnnnnnnnnnnnnnnnnnnnnnnnnnnnnnnnnnnnnnnnnnnnnnnnnnnnnnnnnnnnnnnnnnnnnnnnnnnnnnnnnnnnnnnnnnnnnnnnnnnnnnnnnnnnnnnnnnnnnnnnnnnnnnnnnnnnnnnnnnnnnnnnnnnnnnnnnnnnnnnnnnnnnnnnnnnnnnnnnnnnnnnnnnnnnnnnnnnnnnnnnnnnnnnnnnnnnnnnnnnnnnnnnnnnnnnnnnnnnnnnnnnnnnnnnnnnnnnnnnnnnnnnnnnnnnnnnnnnnnnnnnnnnnnnnnnnnnnnnnnnnnnnnnnnnnnnnnnnnnnnnnnnnnnnnnnnnnnnnnnnnnnnnnnnnnnnnnnnnnnnnnnnnnnnnnnnnnnnnnnnnnnnnnnnnnnnnnnnnnnnnnnnnnnnnnnnnnnnnnnnnnnnnnnnnnnnnnnnnnnnnnnnnnnnnnnnnnnnnnnnnnnnnnnnnnnnnnnnnnnnnnnnnnnnnnnnnnnnnnnnnnnnnnnnnnnnnnnnnnnnnnnnnnnnnnnnnnnnnnnnnnnnnnnnnnnnnnnnnnnnnnnnnnnnnnnnnnnnnnnnnnnnnnnnnnnnnnnnnnnnnnnnnnnnnnnnnnnnnnnnnnnnnnnnnnnnnnnnnnnnnnnnnnnnnnnnnnnnnnnnnnnnnnnnnnnnnnnnnnnnnnnnnnnnnnnnnnnnnnnnnnnnnnnnnnnnnnnnnnnnnnnnnnnnnnnnnnnnnnnnnnnnnnnnnnnnnnnnnnnnnnnnnnnnnnnnnnnnnnnnnnnnnnnnnnnnnnnnnnnnnnnnnnnnnnnnnnnnnnnnnnnnnnnnnnnnnnnnnnnnnnnnnnnnnnnnnnnnnnnnnnnnnnnnnnnnnnnnnnnnnnnnnnnnnnnnnnnnnnnnnnnnnnnnnnnnnnnnnnnnnnnnnnnnnnnnnnnnnnnnnnnnnnnnnnnnnnnnnnnnnnnnnnnnnnnnnnnnnnnnnnnnnnnnnnnnnnnnnnnnnnnnnnnnnnnnnnnnnnnnnnnnnnnnnnnnnnnnnnnnnnnnnnnnnnnnnnnnnnnnnnnnnnnnnnnnnnnnnnnnnnnnnnnnnnnnnnnnnnnnnnnnnnnnnnnnnnnnnnnnnnnnnnnnnnnnnnnnnnnnnnnnnnnnnnnnnnnnnnnnnnnnnnnnnnnnnnnnnnnnnnnnnnnnnnnnnnnnnnnnnnnnnnnnnnnnnnnnnnnnnnnnnnnnnnnnnnnnnnnnnnnnnnnnnnnnnnnnnnnnnnnnnnnnnnnnnnnnnnnnnnnnnnnnnnnnnnnnnnnnnnnnnnnnnnnnnnnnnnnnnnnnnnnnnnnnnnnnnnnnnnnnnnnnnnnnnnnnnnnnnnnnnnnnnnnnnnnnnnnnnnnnnnnnnnnnnnnnnnnnnnnnnnnnnnnnnnnnnnnnnnnnnnnnnnnnnnnnnnnnnnnnnnnnnnnnnnnnnnnnnnnnnnnnnnnnnnnnnnnnnnnnnnnnnnnnnnnnnnnnnnnnnnnnnnnnnnnnnnnnnnnnnnnnnnnnnnnnnnnnnnnnnnnnnnnnnnnnnnnnnnnnnnnnnnnnnnnnnnnnnnnnnnnnnnnnnnnnnnnnnnnnnnnnnnnnnnnnnnnnnnnnnnnnnnnnnnnnnnnnnnnnnnnnnnnnnnnnnnnnnnnnnnnnnnnnnnnnnnnnnnnnnnnnnnnnnnnnnnnnnnnnnnnnnnnnnnnnnnnnnnnnnnnnnnnnnnnnnnnnnnnnnnnnnnnnnnnnnnnnnnnnnnnnnnnnnnnnnnnnnnnnnnnnnnnnnnnnnnnnnnnnnnnnnnnnnnnnnnnnnnnnnnnnnnnnnnnnnnnnnnnnnnnnnnnnnnnnnnnnnnnnnnnnnnnnnnnnnnnnnnnnnnnnnnnnnnnnnnnnnnnnnnnnnnnnnnnnnnnnnnnnnnnnnnnnnnnnnnnnnnnnnnnnnnnnnnnnnnnnnnnnnnnnnnnnnnnnnnnnnnnnnnnnnnnnnnnnnnnnnnnnnnnnnnnnnnnnnnnnnnnnnnnnnnnnnnnnnnnnnnnnnnnnnnnnnnnnnnnnnnnnnnnnnnnnnnnnnnnnnnnnnnnnnnnnnnnnnnnnnnnnnnnnnnnnnnnnnnnnnnnnnnnnnnnnnnnnnnnnnnnnnnnnnnnnnnnnnnnnnnnnnnnnnnnnnnnnnnnnnnnnnnnnnnnnnnnnnnnnnnnnnnnnnnnnnnnnnnnnnnnnnnnnnnnnnnnnnnnnnnnnnnnnnnnnnnnnnnnnnnnnnnnnnnnnnnnnnnnnnnnnnnnnnnnnnnnnnnnnnnnnnnnnnnnnnnnnnnnnnnnnnnnnnnnnnnnnnnnnnnnnnnnnnnnnnnnnnnnnnnnnnnnnnnnnnnnnnnnnnnnnnnnnnnnnnnnnnnnnnnnnnnnnnnnnnnnnnnnnnnnnnnnnnnnnnnnnnnnnnnnnnnnnnnnnnnnnnnnnnnnnnnnnnnnnnnnnnnnnnnnnnnnnnnnnnnnnnnnnnnnnnnnnnnnnnnnnnnnnnnnnnnnnnnnnnnnnnnnnnnnnnnnnnnnnnnnnnnnnnnnnnnnnnnnnnnnnnnnnnnnnnnnnnnnnnnnnnnnnnnnnnnnnnnnnnnnnnnnnnnnnnnnnnnnnnnnnnnnnnnnnnnnnnnnnnnnnnnnnnnnnnnnnnnnnnnnnnnnnnnnnnnnnnnnnnnnnnnnnnnnnnnnnnnnnnnnnnnnnnnnnnnnnnnnnnnnnnnnnnnnnnnnnnnnnnnnnnnnnnnnnnnnnnnnnnnnnnnnnnnnnnnnnnnnnnnnnnnnnnnnnnnnnnnnnnnnnnnnnnnnnnnnnnnnnnnnnnnnnnnnnnnnnnnnnnnnnnnnnnnnnnnnnnnnnnnnnnnnnnnnnnnnnnnnnnnnnnnnnnnnnnnnnnnnnnnnnnnnnnnnnnnnnnnnnnnnnnnnnnnnnnnnnnnnnnnnnnnnnnnnnnnnnnnnnnnnnnnnnnnnnnnnnnnnnnnnnnnnnnnnnnnnnnnnnnnnnnnnnnnnnnnnnnnnnnnnnnnnnnnnnnnnnnnnnnnnnnnnnnnnnnnnnnnnnnnnnnnnnnnnnnnnnnnnnnnnnnnnnnnnnnnnnnnnnnnnnnnnnnnnnnnnnnnnnnnnnnnnnnnnnnnnnnnnnnnnnnnnnnnnnnnnnnnnnnnnnnnnnnnnnnnnnnnnnnnnnnnnnnnnnnnnnnnnnnnnnnnnnnnnnnnnnnnnnnnnnnnnnnnnnnnnnnnnnnnnnnnnnnnnnnnnnnnnnnnnnnnnnnnnnnnnnnnnnnnnnnnnnnnnnnnnnnnnnnnnnnnnnnnnnnnnnnnnnnnnnnnnnnnnnnnnnnnnnnnnnnnnnnnnnnnnnnnnnnnnnnnnnnnnnnnnnnnnnnnnnnnnnnnnnnnnnnnnnnnnnnnnnnnnnnnnnnnnnnnnnnnnnnnnnnnnnnnnnnnnnnnnnnnnnnnnnnnnnnnnnnnnnnnnnnnnnnnnnnnnnnnnnnnnnnnnnnnnnnnnnnnnnnnnnnnnnnnnnnnnnnnnnnnnnnnnnnnnnnnnnnnnnnnnnnnnnnnnnnnnnnnnnnnnnnnnnnnnnnnnnnnnnnnnnnnnnnnnnnnnnnnnnnnnnnnnnnnnnnnnnnnnnnnnnnnnnnnnnnnnnnnnnnnnnnnnnnnnnnnnnnnnnnnnnnnnnnnnnnnnnnnnnnnnnnnnnnnnnnnnnnnnnnnnnnnnnnnnnnnnnnnnnnnnnnnnnnnnnnnnnnnnnnnnnnnnnnnnnnnnnnnnnnnnnnnnnnnnnnnnnnnnnnnnnnnnnnnnnnnnnnnnnnnnnnnnnnnnnnnnnnnnnnnnnnnnnnnnnnnnnnnnnnnnnnnnnnnnnnnnnnnnnnnnnnnnnnnnnnnnnnnnnnnnnnnnnnnnnnnnnnnnnnnnnnnnnnnnnnnnnnnnnnnnnnnnnnnnnnnnnnnnnnnnnnnnnnnnnnnnnnnnnnnnnnnnnnnnnnnnnnnnnnnnnnnnnnnnnnnnnnnnnnnnnnnnnnnnnnnnnnnnnnnnnnnnnnnnnnnnnnnnnnnnnnnnnnnnnnnnnnnnnnnnnnnnnnnnnnnnnnnnnnnnnnnnnnnnnnnnnnnnnnnnnnnnnnnnnnnnnnnnnnnnnnnnnnnnnnnnnnnnnnnnnnnnnnnnnnnnnnnnnnnnnnnnnnnnnnnnnnnnnnnnnnnnnnnnnnnnnnnnnnnnnnnnnnnnnnnnnnnnnnnnnnnnnnnnnnnnnnnnnnnnnnnnnnnnnnnnnnnnnnnnnnnnnnnnnnnnnnnnnnnnnnnnnnnnnnnnnnnnnnnnnnnnnnnnnnnnnnnnnnnnnnnnnnnnnnnnnnnnnnnnnnnnnnnnnnnnnnnnnnnnnnnnnnnnnnnnnnnnnnnnnnnnnnnnnnnnnnnnnnnnnnnnnnnnnnnnnnnnnnnnnnnnnnnnnnnnnnnnnnnnnnnnnnnnnnnnnnnnnnnnnnnnnnnnnnnnnnnnnnnnnnnnnnnnnnnnnnnnnnnnnnnnnnnnnnnnnnnnnnnnnnnnnnnnnnnnnnnnnnnnnnnnnnnnnnnnnnnnnnnnnnnnnnnnnnnnnnnnnnnnnnnnnnnnnnnnnnnnnnnnnnnnnnnnnnnnnnnnnnnnnnnnnnnnnnnnnnnnnnnnnnnnnnnnnnnnnnnnnnnnnnnnnnnnnnnnnnnnnnnnnnnnnnnnnnnnnnnnnnnnnnnnnnnnnnnnnnnnnnnnnnnnnnnnnnnnnnnnnnnnnnnnnnnnnnnnnnnnnnnnnnnnnnnnnnnnnnnnnnnnnnnnnnnnnnnnnnnnnnnnnnnnnnnnnnnnnnnnnnnnnnnnnnnnnnnnnnnnnnnnnnnnnnnnnnnnnnnnnnnnnnnnnnnnnnnnnnnnnnnnnnnnnnnnnnnnnnnnnnnnnnnnnnnnnnnnnnnnnnnnnnnnnnnnnnnnnnnnnnnnnnnnnnnnnnnnnnnnnnnnnnnnnnnnnnnnnnnnnnnnnnnnnnnnnnnnnnnnnnnnnnnnnnnnnnnnnnnnnnnnnnnnnnnnnnnnnnnnnnnnnnnnnnnnnnnnnnnnnnnnnnnnnnnnnnnnnnnnnnnnnnnnnnnnnnnnnnnnnnnnnnnnnnnnnnnnnnnnnnnnnnnnnnnnnnnnnnnnnnnnnnnnnnnnnnnnnnnnnnnnnnnnnnnnnnnnnnnnnnnnnnnnnnnnnnnnnnnnnnnnnnnnnnnnnnnnnnnnnnnnnnnnnnnnnnnnnnnnnnnnnnnnnnnnnnnnnnnnnnnnnnnnnnnnnnnnnnnnnnnnnnnnnnnnnnnnnnnnnnnnnnnnnnnnnnnnnnnnnnnnnnnnnnnnnnnnnnnnnnnnnnnnnnnnnnnnnnnnnnnnnnnnnnnnnnnnnnnnnnnnnnnnnnnnnnnnnnnnnnnnnnnnnnnnnnnnnnnnnnnnnnnnnnnnnnnnnnnnnnnnnnnnnnnnnnnnnnnnnnnnnnnnnnnnnnnnnnnnnnnnnnnnnnnnnnnnnnnnnnnnnnnnnnnnnnnnnnnnnnnnnnnnnnnnnnnnnnnnnnnnnnnnnnnnnnnnnnnnnnnnnnnnnnnnnnnnnnnnnnnnnnnnnnnnnnnnnnnnnnnnnnnnnnnnnnnnnnnnnnnnnnnnnnnnnnnnnnnnnnnnnnnnnnnnnnnnnnnnnnnnnnnnnnnnnnnnnnnnnnnnnnnnnnnnnnnnnnnnnnnnnnnnnnnnnnnnnnnnnnnnnnnnnnnnnnnnnnnnnnnnnnnnnnnnnnnnnnnnnnnnnnnnnnnnnnnnnnnnnnnnnnnnnnnnnnnnnnnnnnnnnnnnnnnnnnnnnnnnnnnnnnnnnnnnnnnnnnnnnnnnnnnnnnnnnnnnnnnnnnnnnnnnnnnnnnnnnnnnnnnnnnnnnnnnnnnnnnnnnnnnnnnnnnnnnnnnnnnnnnnnnnnnnnnnnnnnnnnnnnnnnnnnnnnnnnnnnnnnnnnnnnnnnnnnnnnnnnnnnnnnnnnnnnnnnnnnnnnnnnnnnnnnnnnnnnnnnnnnnnnnnnnnnnnnnnnnnnnnnnnnnnnnnnnnnnnnnnnnnnnnnnnnnnnnnnnnnnnnnnnnnnnnnnnnnnnnnnnnnnnnnnnnnnnnnnnnnnnnnnnnnnnnnnnnnnnnnnnnnnnnnnnnnnnnnnnnnnnnnnnnnnnnnnnnnnnnnnnnnnnnnnnnnnnnnnnnnnnnnnnnnnnnnnnnnnnnnnnnnnnnnnnnnnnnnnnnnnnnnnnnnnnnnnnnnnnnnnnnnnnnnnnnnnnnnnnnnnnnnnnnnnnnnnnnnnnnnnnnnnnnnnnnnnnnnnnnnnnnnnnnnnnnnnnnnnnnnnnnnnnnnnnnnnnnnnnnnnnnnnnnnnnnnnnnnnnnnnnnnnnnnnnnnnnnnnnnnnnnnnnnnnnnnnnnnnnnnnnnnnnnnnnnnnnnnnnnnnnnnnnnnnnnnnnnnnnnnnnnnnnnnnnnnnnnnnnnnnnnnnnnnnnnnnnnnnnnnnnnnnnnnnnnnnnnnnnnnnnnnnnnnnnnnnnnnnnnnnnnnnnnnnnnnnnnnnnnnnnnnnnnnnnnnnnnnnnnnnnnnnnnnnnnnnnnnnnnnnnnnnnnnnnnnnnnnnnnnnnnnnnnnnnnnnnnnnnnnnnnnnnnnnnnnnnnnnnnnnnnnnnnnnnnnnnnnnnnnnnnnnnnnnnnnnnnnnnnnnnnnnnnnnnnnnnnnnnnnnnnnnnnnnnnnnnnnnnnnnnnnnnnnnnnnnnnnnnnnnnnnnnnnnnnnnnnnnnnnnnnnnnnnnnnnnnnnnnnnnnnnnnnnnnnnnnnnnnnnnnnnnnnnnnnnnnnnnnnnnnnnnnnnnnnnnnnnnnnnnnnnnnnnnnnnnnnnnnnnnnnnnnnnnnnnnnnnnnnnnnnnnnnnnnnnnnnnnnnnnnnnnnnnnnnnnnnnnnnnnnnnnnnnnnnnnnnnnnnnnnnnnnnnnnnnnnnnnnnnnnnnnnnnnnnnnnnnnnnnnnnnnnnnnnnnnnnnnnnnnnnnnnnnnnnnnnnnnnnnnnnnnnnnnnnnnnnnnnnnnnnnnnnnnnnnnnnnnnnnnnnnnnnnnnnnnnnnnnnnnnnnnnnnnnnnnnnnnnnnnnnnnnnnnnnnnnnnnnnnnnnnnnnnnnnnnnnnnnnnnnnnnnnnnnnnnnnnnnnnnnnnnnnnnnnnnnnnnnnnnnnnnnnnnnnnnnnnnnnnnnnnnnnnnnnnnnnnnnnnnnnnnnnnnnnnnnnnnnnnnnnnnnnnnnnnnnnnnnnnnnnnnnnnnnnnnnnnnnnnnnnnnnnnnnnnnnnnnnnnnnnnnnnnnnnnnnnnnnnnnnnnnnnnnnnnnnnnnnnnnnnnnnnnnnnnnnnnnnnnnnnnnnnnnnnnnnnnnnnnnnnnnnnnnnnnnnnnnnnnnnnnnnnnnnnnnnnnnnnnnnnnnnnnnnnnnnnnnnnnnnnnnnnnnnnnnnnnnnnnnnnnnnnnnnnnnnnnnnnnnnnnnnnnnnnnnnnnnnnnnnnnnnnnnnnnnnnnnnnnnnnnnnnnnnnnnnnnnnnnnnnnnnnnnnnnnnnnnnnnnnnnnnnnnnnnnnnnnnnnnnnnnnnnnnnnnnnnnnnnnnnnnnnnnnnnnnnnnnnnnnnnnnnnnnnnnnnnnnnnnnnnnnnnnnnnnnnnnnnnnnnnnnnnnnnnnnnnnnnnnnnnnnnnnnnnnnnnnnnnnnnnnnnnnnnnnnnnnnnnnnnnnnnnnnnnnnnnnnnnnnnnnnnnnnnnnnnnnnnnnnnnnnnnnnnnnnnnnnnnnnnnnnnnnnnnnnnnnnnnnnnnnnnnnnnnnnnnnnnnnnnnnnnnnnnnnnnnnnnnnnnnnnnnnnnnnnnnnnnnnnnnnnnnnnnnnnnnnnnnnnnnnnnnnnnnnnnnnnnnnnnnnnnnnnnnnnnnnnnnnnnnnnnnnnnnnnnnnnnnnnnnnnnnnnnnnnnnnnnnnnnnnnnnnnnnnnnnnnnnnnnnnnnnnnnnnnnnnnnnnnnnnnnnnnnnnnnnnnnnnnnnnnnnnnnnnnnnnnnnnnnnnnnnnnnnnnnnnnnnnnnnnnnnnnnnnnnnnnnnnnnnnnnnnnnnnnnnnnnnnnnnnnnnnnnnnnnnnnnnnnnnnnnnnnnnnnnnnnnnnnnnnnnnnnnnnnnnnnnnnnnnnnnnnnnnnnnnnnnnnnnnnnnnnnnnnnnnnnnnnnnnnnnnnnnnnnnnnnnnnnnnnnnnnnnnnnnnnnnnnnnnnnnnnnnnnnnnnnnnnnnnnnnnnnnnnnnnnnnnnnnnnnnnnnnnnnnnnnnnnnnnnnnnnnnnnnnnnnnnnnnnnnnnnnnnnnnnnnnnnnnnnnnnnnnnnnnnnnnnnnnnnnnnnnnnnnnnnnnnnnnnnnnnnnnnnnnnnnnnnnnnnnnnnnnnnnnnnnnnnnnnnnnnnnnnnnnnnnnnnnnnnnnnnnnnnnnnnnnnnnnnnnnnnnnnnnnnnnnnnnnnnnnnnnnnnnnnnnnnnnnnnnnnnnnnnnnnnnnnnnnnnnnnnnnnnnnnnnnnnnnnnnnnnnnnnnnnnnnnnnnnnnnnnnnnnnnnnnnnnnnnnnnnnnnnnnnnnnnnnnnnnnnnnnnnnnnnnnnnnnnnnnnnnnnnnnnnnnnnnnnnnnnnnnnnnnnnnnnnnnnnnnnnnnnnnnnnnnnnnnnnnnnnnnnnnnnnnnnnnnnnnnnnnnnnnnnnnnnnnnnnnnnnnnnnnnnnnnnnnnnnnnnnnnnnnnnnnnnnnnnnnnnnnnnnnnnnnnnnnnnnnnnnnnnnnnnnnnnnnnnnnnnnnnnnnnnnnnnnnnnnnnnnnnnnnnnnnnnnnnnnnnnnnnnnnnnnnnnnnnnnnnnnnnnnnnnnnnnnnnnnnnnnnnnnnnnnnnnnnnnnnnnnnnnnnnnnnnnnnnnnnnnnnnnnnnnnnnnnnnnnnnnnnnnnnnnnnnnnnnnnnnnnnnnnnnnnnnnnnnnnnnnnnnnnnnnnnnnnnnnnnnnnnnnnnnnnnnnnnnnnnnnnnnnnnnnnnnnnnnnnnnnnnnnnnnnnnnnnnnnnnnnnnnnnnnnnnnnnnnnnnnnnnnnnnnnnnnnnnnnnnnnnnnnnnnnnnnnnnnnnnnnnnnnnnnnnnnnnnnnnnnnnnnnnnnnnnnnnnnnnnnnnnnnnnnnnnnnnnnnnnnnnnnnnnnnnnnnnnnnnnnnnnnnnnnnnnnnnnnnnnnnnnnnnnnnnnnnnnnnnnnnnnnnnnnnnnnnnnnnnnnnnnnnnnnnnnnnnnnnnnnnnnnnnnnnnnnnnnnnnnnnnnnnnnnnnnnnnnnnnnnnnnnnnnnnnnnnnnnnnnnnnnnnnnnnnnnnnnnnnnnnnnnnnnnnnnnnnnnnnnnnnnnnnnnnnnnnnnnnnnnnnnnnnnnnnnnnnnnnnnnnnnnnnnnnnnnnnnnnnnnnnnnnnnnnnnnnnnnnnnnnnnnnnnnnnnnnnnnnnnnnnnnnnnnnnnnnnnnnnnnnnnnnnnnnnnnnnnnnnnnnnnnnnnnnnnnnnnnnnnnnnnnnnnnnnnnnnnnnnnnnnnnnnnnnnnnnnnnnnnnnnnnnnnnnnnnnnnnnnnnnnnnnnnnnnnnnnnnnnnnnnnnnnnnnnnnnnnnnnnnnnnnnnnnnnnnnnnnnnnnnnnnnnnnnnnnnnnnnnnnnnnnnnnnnnnnnnnnnnnnnnnnnnnnnnnnnnnnnnnnnnnnnnnnnnnnnnnnnnnnnnnnnnnnnnnnnnnnnnnnnnnnnnnnnnnnnnnnnnnnnnnnnnnnnnnnnnnnnnnnnnnnnnnnnnnnnnnnnnnnnnnnnnnnnnnnnnnnnnnnnnnnnnnnnnnnnnnnnnnnnnnnnnnnnnnnnnnnnnnnnnnnnnnnnnnnnnnnnnnnnnnnnnnnnnnnnnnnnnnnnnnnnnnnnnnnnnnnnnnnnnnnnnnnnnnnnnnnnnnnnnnnnnnnnnnnnnnnnnnnnnnnnnnnnnnnnnnnnnnnnnnnnnnnnnnnnnnnnnnnnnnnnnnnnnnnnnnnnnnnnnnnnnnnnnnnnnnnnnnnnnnnnnnnnnnnnnnnnnnnnnnnnnnnnnnnnnnnnnnnnnnnnnnnnnnnnnnnnnnnnnnnnnnnnnnnnnnnnnnnnnnnnnnnnnnnnnnnnnnnnnnnnnnnnnnnnnnnnnnnnnnnnnnnnnnnnnnnnnnnnnnnnnnnnnnnnnnnnnnnnnnnnnnnnnnnnnnnnnnnnnnnnnnnnnnnnnnnnnnnnnnnnnnnnnnnnnnnnnnnnnnnnnnnnnnnnnnnnnnnnnnnnnnnnnnnnnnnnnnnnnnnnnnnnnnnnnnnnnnnnnnnnnnnnnnnnnnnnnnnnnnnnnnnnnnnnnnnnnnnnnnnnnnnnnnnnnnnnnnnnnnnnnnnnnnnnnnnnnnnnnnnnnnnnnnnnnnnnnnnnnnnnnnnnnnnnnnnnnnnnnnnnnnnnnnnnnnnnnnnnnnnnnnnnnnnnnnnnnnnnnnnnnnnnnnnnnnnnnnnnnnnnnnnnnnnnnnnnnnnnnnnnnnnnnnnnnnnnnnnnnnnnnnnnnnnnnnnnnnnnnnnnnnnnnnnnnnnnnnnnnnnnnnnnnnnnnnnnnnnnnnnnnnnnnnnnnnnnnnnnnnnnnnnnnnnnnnnnnnnnnnnnnnnnnnnnnnnnnnnnnnnnnnnnnnnnnnnnnnnnnnnnnnnnnnnnnnnnnnnnnnnnnnnnnnnnnnnnnnnnnnnnnnnnnnnnnnnnnnnnnnnnnnnnnnnnnnnnnnnnnnnnnnnnnnnnnnnnnnnnnnnnnnnnnnnnnnnnnnnnnnnnnnnnnnnnnnnnnnnnnnnnnnnnnnnnnnnnnnnnnnnnnnnnnnnnnnnnnnnnnnnnnnnnnnnnnnnnnnnnnnnnnnnnnnnnnnnnnnnnnnnnnnnnnnnnnnnnnnnnnnnnnnnnnnnnnnnnnnnnnnnnnnnnnnnnnnnnnnnnnnnnnnnnnnnnnnnnnnnnnnnnnnnnnnnnnnnnnnnnnnnnnnnnnnnnnnnnnnnnnnnnnnnnnnnnnnnnnnnnnnnnnnnnnnnnnnnnnnnnnnnnnnnnnnnnnnnnnnnnnnnnnnnnnnnnnnnnnnnnnnnnnnnnnnnnnnnnnnnnnnnnnnnnnnnnnnnnnnnnnnnnnnnnnnnnnnnnnnnnnnnnnnnnnnnnnnnnnnnnnnnnnnnnnnnnnnnnnnnnnnnnnnnnnnnnnnnnnnnnnnnnnnnnnnnnnnnnnnnnnnnnnnnnnnnnnnnnnnnnnnnnnnnnnnnnnnnnnnnnnnnnnnnnnnnnnnnnnnnnnnnnnnnnnnnnnnnnnnnnnnnnnnnnnnnnnnnnnnnnnnnnnnnnnnnnnnnnnnnnnnnnnnnnnnnnnnnnnnnnnnnnnnnnnnnnnnnnnnnnnnnnnnnnnnnnnnnnnnnnnnnnnnnnnnnnnnnnnnnnnnnnnnnnnnnnnnnnnnnnnnnnnnnnnnnnnnnnnnnnnnnnnnnnnnnnnnnnnnnnnnnnnnnnnnnnnnnnnnnnnnnnnnnnnnnnnnnnnnnnnnnnnnnnnnnnnnnnnnnnnnnnnnnnnnnnnnnnnnnnnnnnnnnnnnnnnnnnnnnnnnnnnnnnnnnnnnnnnnnnnnnnnnnnnnnnnnnnnnnnnnnnnnnnnnnnnnnnnnnnnnnnnnnnnnnnnnnnnnnnnnnnnnnnnnnnnnnnnnnnnnnnnnnnnnnnnnnnnnnnnnnnnnnnnnnnnnnnnnnnnnnnnnnnnnnnnnnnnnnnnnnnnnnnnnnnnnnnnnnnnnnnnnnnnnnnnnnnnnnnnnnnnnnnnnnnnnnnnnnnnnnnnnnnnnnnnnnnnnnnnnnnnnnnnnnnnnnnnnnnnnnnnnnnnnnnnnnnnnnnnnnnnnnnnnnnnnnnnnnnnnnnnnnnnnnnnnnnnnnnnnnnnnnnnnnnnnnnnnnnnnnnnnnnnnnnnnnnnnnnnnnnnnnnnnnnnnnnnnnnnnnnnnnnnnnnnnnnnnnnnnnnnnnnnnnnnnnnnnnnnnnnnnnnnnnnnnnnnnnnnnnnnnnnnnnnnnnnnnnnnnnnnnnnnnnnnnnnnnnnnnnnnnnnnnnnnnnnnnnnnnnnnnnnnnnnnnnnnnnnnnnnnnnnnnnnnnnnnnnnnnnnnnnnnnnnnnnnnnnnnnnnnnnnnnnnnnnnnnnnnnnnnnnnnnnnnnnnnnnnnnnnnnnnnnnnnnnnnnnnnnnnnnnnnnnnnnnnnnnnnnnnnnnnnnnnnnnnnnnnnnnnnnnnnnnnnnnnnnnnnnnnnnnnnnnnnnnnnnnnnnnnnnnnnnnnnnnnnnnnnnnnnnnnnnnnnnnnnnnnnnnnnnnnnnnnnnnnnnnnnnnnnnnnnnnnnnnnnnnnnnnnnnnnnnnnnnnnnnnnnnnnnnnnnnnnnnnnnnnnnnnnnnnnnnnnnnnnnnnnnnnnnnnnnnnnnnnnnnnnnnnnnnnnnnnnnnnnnnnnnnnnnnnnnnnnnnnnnnnnnnnnnnnnnnnnnnnnnnnnnnnnnnnnnnnnnnnnnnnnnnnnnnnnnnnnnnnnnnnnnnnnnnnnnnnnnnnnnnnnnnnnnnnnnnnnnnnnnnnnnnnnnnnnnnnnnnnnnnnnnnnnnnnnnnnnnnnnnnnnnnnnnnnnnnnnnnnnnnnnnnnnnnnnnnnnnnnnnnnnnnnnnnnnnnnnnnnnnnnnnnnnnnnnnnnnnnnnnnnnnnnnnnnnnnnnnnnnnnnnnnnnnnnnnnnnnnnnnnnnnnnnnnnnnnnnnnnnnnnnnnnnnnnnnnnnnnnnnnnnnnnnnnnnnnnnnnnnnnnnnnnnnnnnnnnnnnnnnnnnnnnnnnnnnnnnnnnnnnnnnnnnnnnnnnnnnnnnnnnnnnnnnnnnnnnnnnnnnnnnnnnnnnnnnnnnnnnnnnnnnnnnnnnnnnnnnnnnnnnnnnnnnnnnnnnnnnnnnnnnnnnnnnnnnnnnnnnnnnnnnnnnnnnnnnnnnnnnnnnnnnnnnnnnnnnnnnnnnnnnnnnnnnnnnnnnnnnnnnnnnnnnnnnnnnnnnnnnnnnnnnnnnnnnnnnnnnnnnnnnnnnnnnnnnnnnnnnnnnnnnnnnnnnnnnnnnnnnnnnnnnnnnnnnnnnnnnnnnnnnnnnnnnnnnnnnnnnnnnnnnnnnnnnnnnnnnnnnnnnnnnnnnnnnnnnnnnnnnnnnnnnnnnnnnnnnnnnnnnnnnnnnnnnnnnnnnnnnnnnnnnnnnnnnnnnnnnnnnnnnnnnnnnnnnnnnnnnnnnnnnnnnnnnnnnnnnnnnnnnnnnnnnnnnnnnnnnnnnnnnnnnnnnnnnnnnnnnnnnnnnnnnnnnnnnnnnnnnnnnnnnnnnnnnnnnnnnnnnnnnnnnnnnnnnnnnnnnnnnnnnnnnnnnnnnnnnnnnnnnnnnnnnnnnnnnnnnnnnnnnnnnnnnnnnnnnnnnnnnnnnnnnnnnnnnnnnnnnnnnnnnnnnnnnnnnnnnnnnnnnnnnnnnnnnnnnnnnnnnnnnnnnnnnnnnnnnnnnnnnnnnnnnnnnnnnnnnnnnnnnnnnnnnnnnnnnnnnnnnnnnnnnnnnnnnnnnnnnnnnnnnnnnnnnnnnnnnnnnnnnnnnnnnnnnnnnnnnnnnnnnnnnnnnnnnnnnnnnnnnnnnnnnnnnnnnnnnnnnnnnnnnnnnnnnnnnnnnnnnnnnnnnnnnnnnnnnnnnnnnnnnnnnnnnnnnnnnnnnnnnnnnnnnnnnnnnnnnnnnnnnnnnnnnnnnnnnnnnnnnnnnnnnnnnnnnnnnnnnnnnnnnnnnnnnnnnnnnnnnnnnnnnnnnnnnnnnnnnnnnnnnnnnnnnnnnnnnnnnnnnnnnnnnnnnnnnnnnnnnnnnnnnnnnnnnnnnnnnnnnnnnnnnnnnnnnnnnnnnnnnnnnnnnnnnnnnnnnnnnnnnnnnnnnnnnnnnnnnnnnnnnnnnnnnnnnnnnnnnnnnnnnnnnnnnnnnnnnnnnnnnnnnnnnnnnnnnnnnnnnnnnnnnnnnnnnnnnnnnnnnnnnnnnnnnnnnnnnnnnnnnnnnnnnnnnnnnnnnnnnnnnnnnnnnnnnnnnnnnnnnnnnnnnnnnnnnnnnnnnnnnnnnnnnnnnnnnnnnnnnnnnnnnnnnnnnnnnnnnnnnnnnnnnnnnnnnnnnnnnnnnnnnnnnnnnnnnnnnnnnnnnnnnnnnnnnnnnnnnnnnnnnnnnnnnnnnnnnnnnnnnnnnnnnnnnnnnnnnnnnnnnnnnnnnnnnnnnnnnnnnnnnnnnnnnnnnnnnnnnnnnnnnnnnnnnnnnnnnnnnnnnnnnnnnnnnnnnnnnnnnnnnnnnnnnnnnnnnnnnnnnnnnnnnnnnnnnnnnnnnnnnnnnnnnnnnnnnnnnnnnnnnnnnnnnnnnnnnnnnnnnnnnnnnnnnnnnnnnnnnnnnnnnnnnnnnnnnnnnnnnnnnnnnnnnnnnnnnnnnnnnnnnnnnnnnnnnnnnnnnnnnnnnnnnnnnnnnnnnnnnnnnnnnnnnnnnnnnnnnnnnnnnnnnnnnnnnnnnnnnnnnnnnnnnnnnnnnnnnnnnnnnnnnnnnnnnnnnnnnnnnnnnnnnnnnnnnnnnnnnnnnnnnnnnnnnnnnnnnnnnnnnnnnnnnnnnnnnnnnnnnnnnnnnnnnnnnnnnnnnnnnnnnnnnnnnnnnnnnnnnnnnnnnnnnnnnnnnnnnnnnnnnnnnnnnnnnnnnnnnnnnnnnnnnnnnnnnnnnnnnnnnnnnnnnnnnnnnnnnnnnnnnnnnnnnnnnnnnnnnnnnnnnnnnnnnnnnnnnnnnnnnnnnnnnnnnnnnnnnnnnnnnnnnnnnnnnnnnnnnnnnnnnnnnnnnnnnnnnnnnnnnnnnnnnnnnnnnnnnnnnnnnnnnnnnnnnnnnnnnnnnnnnnnnnnnnnnnnnnnnnnnnnnnnnnnnnnnnnnnnnnnnnnnnnnnnnnnnnnnnnnnnnnnnnnnnnnnnnnnnnnnnnnnnnnnnnnnnnnnnnnnnnnnnnnnnnnnnnnnnnnnnnnnnnnnnnnnnnnnnnnnnnnnnnnnnnnnnnnnnnnnnnnnnnnnnnnnnnnnnnnnnnnnnnnnnnnnnnnnnnnnnnnnnnnnnnnnnnnnnnnnnnnnnnnnnnnnnnnnnnnnnnnnnnnnnnnnnnnnnnnnnnnnnnnnnnnnnnnnnnnnnnnnnnnnnnnnnnnnnnnnnnnnnnnnnnnnnnnnnnnnnnnnnnnnnnnnnnnnnnnnnnnnnnnnnnnnnnnnnnnnnnnnnnnnnnnnnnnnnnnnnnnnnnnnnnnnnnnnnnnnnnnnnnnnnnnnnnnnnnnnnnnnnnnnnnnnnnnnnnnnnnnnnnnnnnnnnnnnnnnnnnnnnnnnnnnnnnnnnnnnnnnnnnnnnnnnnnnnnnnnnnnnnnnnnnnnnnnnnnnnnnnnnnnnnnnnnnnnnnnnnnnnnnnnnnnnnnnnnnnnnnnnnnnnnnnnnnnnnnnnnnnnnnnnnnnnnnnnnnnnnnnnnnnnnnnnnnnnnnnnnnnnnnnnnnnnnnnnnnnnnnnnnnnnnnnnnnnnnnnnnnnnnnnnnnnnnnnnnnnnnnnnnnnnnnnnnnnnnnnnnnnnnnnnnnnnnnnnnnnnnnnnnnnnnnnnnnnnnnnnnnnnnnnnnnnnnnnnnnnnnnnnnnnnnnnnnnnnnnnnnnnnnnnnnnnnnnnnnnnnnnnnnnnnnnnnnnnnnnnnnnnnnnnnnnnnnnnnnnnnnnnnnnnnnnnnnnnnnnnnnnnnnnnnnnnnnnnnnnnnnnnnnnnnnnnnnnnnnnnnnnnnnnnnnnnnnnnnnnnnnnnnnnnnnnnnnnnnnnnnnnnnnnnnnnnnnnnnnnnnnnnnnnnnnnnnnnnnnnnnnnnnnnnnnnnnnnnnnnnnnnnnnnnnnnnnnnnnnnnnnnnnnnnnnnnnnnnnnnnnnnnnnnnnnnnnnnnnnnnnnnnnnnnnnnnnnnnnnnnnnnnnnnnnnnnnnnnnnnnnnnnnnnnnnnnnnnnnnnnnnnnnnnnnnnnnnnnnnnnnnnnnnnnnnnnnnnnnnnnnnnnnnnnnnnnnnnnnnnnnnnnnnnnnnnnnnnnnnnnnnnnnnnnnnnnnnnnnnnnnnnnnnnnnnnnnnnnnnnnnnnnnnnnnnnnnnnnnnnnnnnnnnnnnnnnnnnnnnnnnnnnnnnnnnnnnnnnnnnnnnnnnnnnnnnnnnnnnnnnnnnnnnnnnnnnnnnnnnnnnnnnnnnnnnnnnnnnnnnnnnnnnnnnnnnnnnnnnnnnnnnnnnnnnnnnnnnnnnnnnnnnnnnnnnnnnnnnnnnnnnnnnnnnnnnnnnnnnnnnnnnnnnnnnnnnnnnnnnnnnnnnnnnnnnnnnnnnnnnnnnnnnnnnnnnnnnnnnnnnnnnnnnnnnnnnnnnnnnnnnnnnnnnnnnnnnnnnnnnnnnnnnnnnnnnnnnnnnnnnnnnnnnnnnnnnnnnnnnnnnnnnnnnnnnnnnnnnnnnnnnnnnnnnnnnnnnnnnnnnnnnnnnnnnnnnnnnnnnnnnnnnnnnnnnnnnnnnnnnnnnnnnnnnnnnnnnnnnnnnnnnnnnnnnnnnnnnnnnnnnnnnnnnnnnnnnnnnnnnnnnnnnnnnnnnnnnnnnnnnnnnnnnnnnnnnnnnnnnnnnnnnnnnnnnnnnnnnnnnnnnnnnnnnnnnnnnnnnnnnnnnnnnnnnnnnnnnnnnnnnnnnnnnnnnnnnnnnnnnnnnnnnnnnnnnnnnnnnnnnnnnnnnnnnnnnnnnnnnnnnnnnnnnnnnnnnnnnnnnnnnnnnnnnnnnnnnnnnnnnnnnnnnnnnnnnnnnnnnnnnnnnnnnnnnnnnnnnnnnnnnnnnnnnnnnnnnnnnnnnnnnnnnnnnnnnnnnnnnnnnnnnnnnnnnnnnnnnnnnnnnnnnnnnnnnnnnnnnnnnnnnnnnnnnnnnnnnnnnnnnnnnnnnnnnnnnnnnnnnnnnnnnnnnnnnnnnnnnnnnnnnnnnnnnnnnnnnnnnnnnnnnnnnnnnnnnnnnnnnnnnnnnnnnnnnnnnnnnnnnnnnnnnnnnnnnnnnnnnnnnnnnnnnnnnnnnnnnnnnnnnnnnnnnnnnnnnnnnnnnnnnnnnnnnnnnnnnnnnnnnnnnnnnnnnnnnnnnnnnnnnnnnnnnnnnnnnnnnnnnnnnnnnnnnnnnnnnnnnnnnnnnnnnnnnnnnnnnnnnnnnnnnnnnnnnnnnnnnnnnnnnnnnnnnnnnnnnnnnnnnnnnnnnnnnnnnnnnnnnnnnnnnnnnnnnnnnnnnnnnnnnnnnnnnnnnnnnnnnnnnnnnnnnnnnnnnnnnnnnnnnnnnnnnnnnnnnnnnnnnnnnnnnnnnnnnnnnnnnnnnnnnnnnnnnnnnnnnnnnnnnnnnnnnnnnnnnnnnnnnnnnnnnnnnnnnnnnnnnnnnnnnnnnnnnnnnnnnnnnnnnnnnnnnnnnnnnnnnnnnnnnnnnnnnnnnnnnnnnnnnnnnnnnnccgctcttcaagttcatcgttgatatcgtgcttgaatgctcgatgctccccgatgatcaccggctcataaacctttgtcgccatccaactcagattttgcggattcctcacttcaaccctgtccgggaactgccgacatagcagcttctcgcctatgaaagctttcggacaatcaaggacttcgtaatactcgttgcctatccgaacgctttttgtgccgtccataactctgtaaaacgtcactggcgcatactggaatatgtccgcgccttcagggtaaaatctctgctctctttcagcgaggctcaagccgtaaattctctctctcgacatccccgcgaatttcgggttaggatgagagcgactgttataatctttcagataatttgaaagcatgttttttatttctgcgaacgtaaatactctttccttatcaagtagcaactcaagttcaaacctttgccacaaagtcctccacggacgttcaatttttcctttcgcttttgagttgtatggcttgtttgtttcaagctccacccctaactccctaaacaacaactcgcctctgttttttcccaatgggccgctgtccgttatcagcttttccggcaacccgaaaagcggattgtcatccttcttctgaaacgctttctggataaaccttgcggagccgtcgaagtcttcgccgtgcgcgacaaccgcgtcgatgaaaaggactcccgaaaacccgtccgtaacgccgtagtagtaaaacatctcccggcgcgcgtcttctaaaactccatcagcgttgattcgggagtttttccagctttctctttttgtggatcggacggcaaacaaccattccccagcagcgtccctatccaccgggtatagatattcgctgccgctgccgtcaaattgccatgcgtgattagcgtatttttcagttaatcttcgatactcttccctagttgtaatattgagttttcgcctgatgtatttcgcggtcgccggtttcaaagctccctgcgggattcgcccgtcgcgctctgccgctttaattgcgctctcaagtggcaacaccctctttttttccccggccatcgcaatcaatttctggtactcgcaagctatcttcgtatattcaacaagctcgttttctctcttgtcggctttataatccgagcgcaaagcgcgcttccggcctctcaatttcgcaatgtttcgcgataggtttctaggcgacatttttaacttcgcagcttccgccgccatcgccgcgcttcgttcgccgtgcggcgcggactcaacacgctccgccgcttccaatagttgccgtaccatgtctggactcaatctctctctccttttgtatctaacttaggaagtttgctctcctctggatgccagcccagcatatcatcgaatctcgacatctcattgcctacgcatctgatcgcgtccctgattcggtctctcgtttccgcattctcaggctgcatctgaaccacttctcgttgttcaagaacctctttcaacgagccgctaaacagcttcgccctctctcggagcacaacaatatacttaaacaacggctcgttcgcgctctcaagttcaagttcttccagcttttttattaacttatctttgtctgtttgtagttttctaaggctctcatccctgagatcgacgagctttgtttgcgtgctaagcgccttctttatgttttttataaaggccacaaattccgggcgcgggagcgcgtttgcttcatctatgctcaaagtcagtttttctgtgtcccccggctcctgaacaataatcttgtcgccctcgaatcggacactcggatcattcaaaagccccataatctcaagggccttaactgagtccgacatcttgcctataaaaaacacttcccggtttttgaaaaattttatatagttgtatccgcttctctcacatattcctattgcctcgcaaaatccttgaaaggcttccctgccgaagcgcgttttgacttcgttcagtaaagcgccttgcaaagccgtcagcttgtcaacctcgtggaagatcgtttttctttgcaagtctatcattctgcatttcgccgccgccgccgccagcacgtccggcccgcttcccggcggcaaaagcttttttacatccagaagttcaacatcggtgttcacgatttcggctttgtcgattgcttctagcgagacgttgttttcaccattcattgtgtgtttctcctatgttatattgtcgtatatcaactaaatgctaaaaaaagaggcgagcggcaaaaccgcttgaaaggaggtgaaccatgacccgcgtaatacccgccgcccgcctgtatcctgtgaaaacatgaacatagaggctctgttaaagacaggcgagatcggcgaccgccgaccccgcccgcgttggaggagaaacagaaaacaaatcgtctatatttagttatcacttttgccgtccttcattgccctgatctgctcccggagcctcataacacaccccgacagcgtcgcgaccatgctctcgatccgaccctcgaaagcctgtaagagcgcgtcttcagtttccagcgcggacagttcagcccggacttgacgccaccgtccccggcgtttccaattatgcaagctgaactcggaaacttccccatccactccatgcttttttatcaacatttggcaaactttcggaatggagccggtatcaaagtaaaaccgcgccgcgtcgccgcccagcctcgcgaattttcctttttccttgccgctcatcgttcgacctcgatcccgacgtttctgagttttataatgtcgcattctgtcaacattggttgtttcacattccaaaactcttcatagtcaattccggcaattcgggcgagggcgacgcgcatccaattcgacttgcgcttattgcaaatgacacgcgaaaccgctcctgtcgtaacaccgagcctttttgccgcctctcgttgtgtaagtattcctgcggtagccagcttgctacgcctatttcgctctaatgtcttactggaatgccacgctatcgtttccgcctgactgctcatacatactccctttgacgaggaaagctgttgtccattggcttgaagtgtgatataatcgctttggctgattgtatggtttgctttatgcagatttggcatactgtgattatagctcggtatactgtgggtgtcaacatgtttgccaaatattatttgcgtaaccaaacacgtgtgatttgaggtaaaagagagcgtggaagaaaaaaaaactccttcaaaacccaaaatgcctccttttgacaaggttgctattggtcagcgaattaagcaggcaagaaccgagttgggtttcactcaaaaagtgtttgccgatttgctatctgagtttttacagagttctaaaggggtttcctatggttttttatcacaggttgaaacaggtaagtataagcctagcgcggaattattatatgcaatgcaagctttttttaacattaatttatattggatttttcatggtttaggcgatgtttttatttccactgaaaaactactgccagaggatgaaaaccatccacaacggattgcttaccgttcagtgtttttattgatgaatatatcagacctaatcttttatggtaaatacgctaccaataaaatcaaagatttaaatgtacgtttggttactgtattatttgagttaaaattgaaaaacccagtattgtttgatttctttttgcatggcaatgacaattcagacatatttgataccttagaaaaaaaccaaaaaagattatatcttttagatgaggctgaaagagaagctttactttcagggtttttattagataaaactgatggcgaaacgataaaatgtccccctcgaaaaaagaagtgattcttccgatagtcggttccctctctatctatattaataaaagatgtcttctatctcgttccgctcatggctcgcccccggaagcttccgagtccccagctaatcccgataaacgtaaaaaaacgaaaaaataacccgaactcacaccctcaagatcatcccgttttcttgcagctcccttgcaaaatttgcaacaaatcttgaaatgctgcaaagcttttctccaaaatataccgcctcaccctcatgcccctctctcgattgtccgttttttgcaatgcccttgcaaaacttgaaacaaatcccgaattgttgcaaaaactgttttccgaaactcaccctcttacgcctcatacccctctctatatatacaatctcttgtctttaaatagtccatcgggcgcgccgcgcccgcccgcttcacccgccgtcaccatcgaaacaccgccatgctcccggagcctctggactcccgccgccagcccgctccccggcgacaccccgctttgctttcatccccgaaaccttcagccccgatccggcccgaccaccgccgccagcccgctccccggtgacaacccgcgccgcgatctcatccatcgggccgcgaagcgcccgccctttttactttcgtttccgaaacctaacggccccgatccggcccgcgccgccagaaggctcccgcgcccggcctgacgctccacaaaaaaaaggacggcccccgccgccacaacacaaaaaaaatattttcttccaaacccatcgaatactttcacccgcgcaaccaaattccccgacttccgaaagtccacaacccccaaatgaaagtattcggaaccgaagttatgacagaaccttacgttttttcagaccccccggtacatggtatcagcgaaatttatgaagccgtatttcttatcgccgaatccgggataaatcgtcgcgctaagacgttcctcgcatcttcagtcgtgtccgtgaaaaaaaaatgggggattagaacttgtaccctatgccgtcatactttgttccgtccgcggcaatgcaaggcgaacagcacccgctctgcccgtccccagcagcctcaaacagttcctcgcagtacggaccgcacgggcacggctcgtcaagatcatcgccttcgatatcaaaaatgcccgagccttccgcaacttgcatacttgtggccgtattatatccgctggtgttgacgattatgagtacggatcttttgtatccgagagcgacggagcatacgacgccgacgggtttatcaagaggattcagattggagagcaaagcgtagttccagccgggtttgtagttgccggagtaatcaggtccggaaactcctgaatattcgggggaacaaagctcgaacctctgttccgcagcgttgtcgtcccgaataaatgtcccctgaaaactgaatcctttttggcccagacattcgctgtcggacctgtcgcacaccgaagcgcaaagcccggaaggcgtgaaatccgccgagtacggatgcgacggcatcaccgtctgggcgacggccgtgtgcgaacaatccgcgtccgtcggaaaaaccttcattgccgtttcgttgatgtcgtccgtccttccgcactcagtcaaatcgacgatgggaaggaattccatcagggaagcgttgtccgtgccgatcaaggatctcacgggaaatcccttgcacgagttggcggcatcgttgatagccgtcttaagaacaagagtcgctcttatggcgtttctcactctcgttgacgcctgatactggtaatacgaaggcgtcatggcgcccatcaatatcagcattatgcacaaaacaacaagaatttccgccaaggtgaatcctttttcccggcgtcgcttgtttcgcattttttctccctgaatattattctgtttcaggcgcgcaataaaaaagcgcttcggctaactatggtattccccatttcgactggagtcaaacaatttgcccgtccgagaacgcgtgcgaatttgcctcataatgtatctatatcaataaaagtatacacccgcgcccaaaacactgtcaaacacagttcatttcagcggtttcgagttcaaagagcaaatgaaaacagaactaaaggctaaagattgagaatccgcgcaatccgctttcacgctgctggaccgcatttatcaccaatccgcgctggaactattctatgatatcaacccggcgggggactttatagggagcaagcgcagagcggagaaatttcctcagttcagccggttcagctgaggctccggagcgaagtttcgcttccgccataactctctctccgagggaatcgtccgggacgccgaagacgcggcagctttccaccgccggatgcgcgccgagcagcgcttccacctcctgcggatagacgttgaacccgccgacaagcacaagccttttcttatggccggttatgtatatatatccgtcttcgtctatgcgggctaggtcgccggagaacaaccaaccgtccttaagaaacatcgccgtgtcttcgggtttttcgagatattcgcgcatgacgttgccgccccggacgcaaagctcgcccgtatcgcccgtcgggagcgcctcgccgttctcatcgacgactttcacagttatgccttcaatcggcgggcctactgagccggctttcacaaactccctgccccgcatcgggttcaccgaagtcaccggcccgcattcagttatcccgtacccctgatatacatttgcgttgagtctctccacaagcccttcgtatagatcgtctgtcagaggagcgcctccgggaactatcgccctcacgaacgataggtcgctccccgccgagccgaatttatcaagcagccttttgtttatcgtcggcacgttcggaaaaacgcttatcttctcttttttaaggtccgccatcacgcgatcctctgaaaacatctcatgcagaacggtcttggcgcccgcgagaaaaggcagatgcagacatgtggtgcaggcgaacgcgtggaacaggggaatgacggtgagaaaagcgtcgtcttcatgcgccgccgccgtcgcgacgctcgaacgggcgttggtcatcagtcctagatgagttaggcaggctccgaggggatatcccctccatgcgttggtgtagatgatagcagccgtgtggttcggatctaggtccgcgggcgccggcgcggggaccgcctctgatatcgccttcttcatgtcgcgcttggccgggtcgcccatagaatcgctgtaaagcaacttcgttccggcgttcgcggcggcctccctgacgggcggctcgaacatcggatgcattatcgccagtttcgccgcgctatctttcagcatatattcaatctcgcgggcggaatacagcgggttgatagtgacgacctccaccccggccgcgaaggccccgtaaagagccacagggtattccggaacgttcggaatcgctatcgccatcctgtccccgcgcgacatgcccatctcgccgagcgcgcccgcaaacctcagcgcgtccgcgtaaagctgctcgtaccttatcactctgtcgtaaaaaacgaccgcgggccggtcgggaaaccgctccgcgctattttttagattgtccgcaaggttcataaaatcttattcctgttttccgggcgcgcgcgcacaccgcgccgcaaagcgccctttatacagtttccttattatgtgggtggaaattgcctctatcgaaaaaaaacgagggtcaagctcgcgatgcgaggtctttcaatagccagtcgacggcctctgacaggtcttctgcaatgaagtcgggttcgacgccttcgcgctccctgttgaactcccagtcgcctctgccgtatcccgtcaggacgagtatgcctgcggcgcagcccgcgcgcttcgccagcgccacatcgctgagcttgtcgccaatcatgtacgaacgggcaacgtccagtcccatttccgccgccgccctgtcaatcagtcccgtcttaggtttcctgcagtcgcagtccatcctgtaaggcggctctccggcggtcggatgatggggacaatagtaaatcccgtccagctttgcgccgcccacggccagcagctcgttcatgcgcgcgtggacatccgctatgagtctttcagggaaatagccgcgcgcgacgcccgcctgattggtgaccagaacagcgggcgctcctgcttcgttcagcttttttatcgccgaagccgacttttcgagcagcttgaaccggctgacatggttcacatagccgatctcctcgctcagagtgccgtccctgtctatgaaaacagcgggtattccgctcatcgcgcgcctcccggcagccgccgcgttttcaccgcgacctgtcgttttcctctataatatctttcatcctgaacacgagatcgagcgccttgcgcggagtcagctcttcggggtccgccgcgcggagcatttcctcgatgcggctcggaggctggtcgggaataagcgcgagttgcgccgtccgggcttcagggacttcgatgtccgactccgcttcctgagaaaccagaatttccgacgcgcggcgtatgaccgaggcgggtatgcccgccagtcttgccacctcgactccgaaactcctatccgtgccgccggggcgcaccttgtgcgtgaacagaatctccctgccccgctcaactgcggaaacgtggaagttctctatcctctcgaacaggtcggccatgcgcgtcagatggttgaaatgtgttgcgaatagagttctcgcgccaatcctctcgtgtatgtattcggagacggcccatgcgatgctaatgccgtctgcggcgctcgtgcctctgccgacctcgtcgagcagcacgaggcttttctttgtcgcgttagtcagaatcgtcgccgtctctaccatctccaccatgaacgtgctgaggccaagggtgatatcgtcgacagctccgaccctagtgaatatcctgtccaccacgcctatctccgccgcgcggcacggcacgaagctgcccatctgcgccatcagcgttatcagcgccacctgcctcatgtaagtcgattttcccgacatgttcggcccggtgatgatatgtatctggctcttcgagcaattgagcagggtgtcgttggggatgaatgtgcgcgcgggcatcgtcaggtccagcgacgggtgccggccttcttctatctttatcgtttccgacgcgctgacctgcgggcggcagtacctgttttcctccgccgcctgcgccagcgactgcaacgcgtccagcgccgccaccgcccgcgacgtcttcagcatccttccgatgtgccccgccagattgtcccttatcccgcagaacaactgatattcaagctcttcgagcctgctttccgctccgagtatcgcgaactctttttctttcagttcctctgtgtagaaccgctccgcgttggatgtggtctgtttgcgtatgtatctatcagggacgtttgccagattggccttcgtcacttcgatataataaccgaacactttgttgtagccgattttgagggatttgacgcctgtttcccttcgttctttttcttcgaggtcggcaatccatttccgtccgccttttttcagcgcgcgcagttcgtccacgcgggcatcgaagccgtcgcggatgatgccgccctcgcgggcggacctcggagcgtcgtcagaaacggcggcggcaaggtcggctcgcgcgtcttccagcgtgtccatgtcggcgcgcagggactccagcatgtcgcacttgaaagcggaggcgagggccgcgagcgcgggcagcgccgctagtgagtcgcgcactgccagcgtctccttgggcgtgattagcatggtggcgacccggctgcaaagcctctcgatatcccttacctcggaaaggctttcccttgcgccctcccgcgccgtcctgttttccagaagctcgccgacggcgtccagcctcaggtttatctccgccgggtcgttgagaggctgttcgagccagttgcgtatcagcctctttcccatcggcgtgagagtcctgtcaagcgcccacagaaggctccccttcttttccttctcgcgcatggtttccgtcagttcgaggttgcgccgcgtcgccgcgtccagatacatcccgtcgcggggccggtagagcgaaacggacatcacgtgcttggggtcggcgcgcaggttgtccctgacatagtccagaagctgcccggcggccattatcgcagcggggaactcctctatgccgaatccgagcagcgtcttcactccgaaatgcgcgcacagcctgtcccggtggtacggcgcgtcgaacatcaggtcaagctcggtgactttcacgtcgggaaaacgggccgatattctaccggcggcgtccgccccggaatcgcgcatcgccacgacgcattcgccgggcgacagccgctcgatctccctgaccagagacgaatcgtccgccgacctcgatatctcgcccgccttgaactccccggtcgaaacgtcgagtatccccagcccgaacctgtcgccggcgtccgccaccgaaagtatgtagttgtttcgcgatgagtccagcctgtccagatcgagatacgttccgggggtgacaaccctgacgacttcccggttgacgagtttaccggcgaccgcgtcctctgtctggtccgcgatggcgaccttgtgtccgcgctggatgagttttgccacgtaaccgtcggcggcgtgatggggcacgccgcacatgggcagtttgacgcccttgccgaactcgcgcgcggtcagcactatttccagttcggcggcggcggttttcgcgtcctcgccgaacatctcgtagaaatcgcccagccggtacatcaaaatggcgtccctgtggcgctccttgatggcggcgtactgctgatacataggagtggcgttcatacggcctctcccttcagggcgtgcggagacgctcccgtgatgcgggcaagcaactcatctcccggctcggccttaacgccttcgcgcacagtgaaatccactatcctgttctcccgcgtccgcccccgccgccgctctccgcccagagactcgaagaccatcgtttccgcgattccgcctacaaggctttcgttgatttccctcgatatattctcctgcaaatccaacagccgcgcaagccgcgacttcttggcgtcgagcggcgcgtcgtcggcctgcccggcggcggcggtccccggacgcggcgaatatttgaacgcgtacaactgatccacccgcgcgcgcgacgccagctcaagcgtccgctcgaattgctcttccgtctctccgggataccctactatcgcgtccgccgatatgccgcagcccggcgagtagtttcttatcatttctattgtttcgagataatacgccgcgtcgtatccgcgcctcatcctcctgagaatctcgtcgtcgccgctttggaacggcgcgtggaaatggccgcacgctttcggcagcgccgacagcccgcgcagaaactcctccgtcacccatttcgggtgcgacgttacaaaccttatccttgttacccccggcagatcgtggacggcggctatggcgtcgagaagggatcttttcggcgataagtccagcccgtaagcgagcacgttctggcctagaagaatgatttcccgcgcgccttcctccgcctttatcgcggcttccgctcgaacttgagccggagtcaggctggattccgcgccgcgcgcgtatggaaccacgcagtacgagcagaaattcgagcagccgcgcaccaccgtctggaaagcggacgccgggccgggggcaaacagagccgctcccgccgccaagccgggaaagttctcggccacagcctcccggatgatgtccgcgtagtcctgcggcctgcccgccccgacgacgtagtccacgtcgcgaatttccgcgcggatgtcggccagttcggcggagcatcctcccacgccgacgacgacgggcgcgccgccagtctttttgcgattgcgcaacacgcctatgaagctcagagccttctcctcggctttgcgccgcacgctgcacgtgttgacgtgaaccagcgaggcatcttcgggcgtcgccgcctccgccatgcccatcgagcgcagcatccgcgcgagcgacgccgagtcgtccatgttcatctggcaaccgaatgttttaatgaaaaatttgggagggcctgtctccgccatgaagatcagcctttcaactccctgaaaaagcaggaccatgctcctgtgtggcaggccccctcgccgctctgctcgacaatgaccagaagcgcgtcggagtcgcagtcgtacatcacctttttcactttttgaaaattgcccgaggtcgcccccttgttccagaactcgctgcgcgagcggctccagaaccacgtcgtgcccgtctcgatcgtccgccgcacggactcctcgttcatgtacgccaacataaggacgtccccgcttttttcatcctgaacgatagccgggataagccctttttcatcgaatttcaaatccatgtcgaaaccttctctcttggcgcaatgaggtcacagcctcatcgcgattcccctgtcccgcagatattcctttgcctgccttatggtgaaaatcccgtagtggaacagagaagcgaccaataccgcgtctgtcctgccgtcatgtatcgcgtcgtagaggtgagaaagctcgcccgctccgcctgacgctatcacagggattctcaccgcggtggagatggcgagattcaactcgttgtcataaccgattttcgtgccgtccctgttcatgcttgtgagcaggatttcgcccgcgccgcgccgttccgcctcgaccgcccagcccaccgcgtctatttcggtcggttttctgcctccgtgcgtgtagaccacccagccgtcgcccactcgcttcgcgtcgatcgcgaccactatgcactgcgctccgaaaatttcggatgactcgtttatcagactgggattcaggacagccgcagtgttgagcgacaccttgtccgcgcccgcgctcagcagttgccggatggtggcgacgttagtaatgccgcccccgacggtgaacgggatgaataccgtctccgccacccgtctgaccacatcgagcattatgtggcgcttgtccgaagaagcggtgatgtccagaaacaccagttcgtcggcttcggcttcctcgtatttttttgcctgctcgacagggtctccggcgtccacaaggttcacgaagttgacgcctttgacgacgcgcccgctgtcaacgtccaagcagggtattatccttttggcaagcaaaacgccctccgcgccgcctactgcggaaatctttcgacggcggccttgagatcgaagtcgccggtgtacagcgcgcgcccgatcaccgctccgtcaaggttcggtttttcaagagcggcgagccgctcgacatgctccacgcgggacaccccgccggcgcacaccaccgggatttccagagcgtccgccgcctgcgacatcatgtcgaaattcggctccgtcagcatcccgtcccgcacgatatctgtaagtatgattagtttagcgccgtcgtctcgcatcctgaggcacgcctctatagttactatttcagattcgtccgtccagccccggagagcgactttgccgcccttcgagtcgatggacaccgcgaccgcggcgccgaactcggagaaaagccccttggcaaaatcccgcgattcgagaacggacgtgccgactatgacgcgggaagcgccctcgtccagccagcgccggacgtcagcagccgaacggacgccgccgcccacctgcgtcctgattcccggcgacgcctcgaatatggcctttgcggcgtccaaattggaaaaacatttctggtcgagcgcggcgtcgagatcaatcacatgcagccacttcgtcccctcccgcgcccaccttatagccatttgctccggcctctccgaatacaccgtgcaaagctccctcttgccctgcgtcagccgcacgcatttgccgtccatcaaatctatcgccggatataaattcatcccttcgccatcctcccgaaattctcaagcagcttcatccccatcctctggcttttctcagggtggaactgcactgcggtcacattgtcgcgcgttatcgacgaaacgaactcgccgccgtaatccgtgacggtcatcgccagcgccgggtcctccggctcgacgagaaacgagtgcacgaaatagaagaacgagccgtcgggtattccatcagcgaccggccctctgttcctgaactcgagctggttccaacccatgtgcgggattttgaggtctcctctgaagcgagtcgccttgcccggaaaaacgccgaggccggggatgcgctctccttcttcgctgtagtcgaaaagcatctgcagtccgaggcatatccccaagaacggcttgccggatttgatttcagagacgattagccccgcaagcccctgcgattccaagtttttcatggccgccgcgaacgcgccgacgcccggaagaaccactcccgcagcgtcccggacgtcctttgcggaggtggtcacgcgcgcgtccgcccccacccgctcgaacgccttctgcacactcctcaaattgcccattccgtagtccacaatcgcaatcatgccaaatagtgtaggagttcgatatttatgtgtcaaacgatgacgtccgggcgcggcgcgtcactgattgagtttttctagggtttcaatgaatgagtctatgttgatgggtttcgaaaccgcgccgtccgctccgatctcgcgagcgagagcctcgatccgggcgcgcggcatcgcgctgaacaggaacaccatgggagccggagccgggccgctcttaatctttccgcacagttccgcgccgcttagccccggcaactgcacgtccaacatcacaagttgcggatcaaaagccgccatctcctcgaacaactctgtttcattcgacgccaccgcaacgtcgaatccttcggaaagcagcatcgtcttcaccaagtccaacaggtcgccgtcatcgtccacaaccagaatcctgttcaccctgcgcgattccacatgctccacagtctttagaatcggaatagtgaacgagaacgtcgagccttctccgggaaccgattcgacttttatccgtcctccgtgcgcctcaatgaactccttgacaatgcttagaccctttcccactccgtccgaaacaggatgcgagcctttcctgacttggaagaaaggcttgaaaatgttcttcaggtcagcggacgcgattccgatccctcggtccgaaacgcttatctccacgaaaccgtcctcgcgggtcgccgacacggcgaactgcagcctctccggcgtcgaatacttcaccgcgttttctattaggttgtccagcgtctgccgaattctgccatcgtcgcatttgacgatgacgcctttcagcgattcggacacctccttcttgaaggagtattccgacgttcggaacctgcgccggacgatgctctctatcataaggcgcgtttcgttcagccgcgcctcgaggaagttgtatatgttgatctcggccatatcgtaggtcgtcgttccgctctcgaatgcgtccagcgtgataagctcttcgaccagcttgagctgctgccggcctctttcgttgatggttttgattttctttttggcggcgtgcggcagatcctccttgagcaacatctcgctatatccgagtatcagcgacagcggcgtcctcagctcgtgagatattgaactgaggaagttaatcttttcctgctctatcctcttcctgtcggttatatcgcgcgatatgcccagcacggaggacacccgaccgtcgggggatttgatgggaacaagcctcgaacccagccagaactcccggtcgggaaactgcgtgacggtttctatgtagaacgattctccggattcaaaaaccctgtcgaggctctttttctgcctgtcggcgtccggcgagccgaacaactccgctcttgtaacccctatcgtctgttccggagtcatgccaagttgacgcgcggcgaaactattggtgtatctcacgatgtcgtctcgatcgactatgaaaatgaagtcttcggcggcttccgccagagtccggtatctctcctcgctctccctgagcgcctcttccgcctctttcatcccggttatgtccacatccatacagatgaactctttgtttccgtcccctacgtctatcggaaatatcatagaatacactacgacgctggagccgtctttcttgttgcaaatccattcggacgggccggaaggaaggttgctttcattcatctccttaagcagaatgtgaaaagcctcggttgccgcagagtcgagagtcgctccttccagagttctccctatcatctcctcggcggaccatccgaaaaccgattccgccgcgttgttccagtaaataacccggccctcgacatcgtatccctcgaccgccacgttcggcgtgttgcttatgatggcgtccaacctttgttcgctccgtttgagcgcggtttccgcttgatgcctcataagcgcgttggcgaatatctccgccaccaccgacagcaacgcgctgtggtccctcttccatcttcttctggtcttcaccgaatcaagccccatgaatccggaaagcttttcgttggaatacagggggaacataatcagcgacttgatgttttgcgcgttgaaaatgcttttttcaacttcagcgttttcaggaatcgcggacacatcgtctatagctatggtttctcccctgatgaacttgggcatcagccatttgagcgtttccaacggaatatttttgctgttctcaatctcggagctgattccctccgcgcaccattcatgcgtgttatcgacgaacaatccgtcgtcggtaagacggaacagatagctgcgatcgacctgcaggaattccccgagccttgtgagcgcgtcattcacggccgaatctatattctccgccccgacgcccacgaaactcgccgatatatccataacgacgctctggaagtcgaagttgtagcgcaacgcctcttccgcccgccttcgcgtcgtcacgtctctcatcaccgtcacaactctggcgacggcgtctttttcgaatatcggtatcttgcgggtctccgttattatcgtttccccgtcgatttcgttgatctcttcggaaagcatcatgttgccgctggtgaaaaccgatttgtattcctcccggacggagtcatcgagaaaagaaaaaacatcgaaaacgttccggcccgcgatgtccgtcggcaaaccgctttgcgcgttccattccttcatagttttgttgaaaagaacgatgttgaaatttctgtcgacgacatgaatcgcgtcggccatcgagtccatagtaagtctatacctcagttcggactccctgagcgattgttcggcgcgtcggcgctgtgtaatatcgcgcacgaccgatatgaccgtcctgttcggcgaattcaaatcgcctttcagcgagtgtattgcctcgaaatacatctccccgtccgcatatggcagagaatacgtcgcggcggatttctcgcccgtctcgaatgttttgttgaccgccttgtttagcgcttccgcggcttccggaggcagcacgtctgttggtttttttccgataaaagcctcgggcggcgcgtagagcctgtctgatctcgaagcatggtagccgactattcgcccttcaagattcacttcgaataatatatccggcatcgccttcagagtggtctcaaggcgatccctcgaatccctcagatcttcctccatgcgccgccggttcgagatttccttcctcaactcttcaataacttcgctgaactccgccgtgcgttccttcactgtttcctcaagcctttcttgatggctgagcagttgttcctctgccttccttctctccgttatgtcagtgatgaccgcgaaactgcctgaaaaccctcccacagcgtcgaaaagagggttggcagacacgagcgaatgcagaggcgagccgtcagaccgggtgaacgtcaactcgtattttccgccctcgccgagctttctccttgagaattgttttttaaatagggccaaattattcgcgtcgaggaaatttgttatcgactttccaacgactccgccgcgttcgcgcccgagcatttccaacgcgcggttgttcgcatacgtcatggctcccttttcgtctaacaccgttatgccgtcgtacatggtttctactatgagcctgaaatactcctctctctccctcagggcgttttccatctttatctgttccgtcatatctcttatgacgccctgatatccaacgaccgagccgtccggcccacggcgcgcggtcgcagttattttgcagtctatctcgcgtccgctcttgtgcctgagtttgacgtcgtaattcctgacggagccgcgggtctcaagcgcagtctgaagcggctcgcgatctctttcgtccacgtatgtcttcaacacatttctatttactatttcttctctctcatagccgagcagcgaaagcgccgcctgattggcttccagcacaatgccttcccgcgtcgatacgtacacagcgtccagagactgctcgaacagcgctttgtatctgtcctcgctctccctgagcgcctccaccgcctctttttgtctagtaatgtctatcccgaacacggtgattccggactgctctccgttttcatatatcgggaacgaattgttgatcacatgcctgatttctccagaggccgtcttgattcttgaaacgattatgtcctgtttccccgccatccctctggcgagcgtgtcaatctccattttcacatccgcaaccggcacgaactcggtcacgtgtttccccaaatcggccctcgtgtaaccgtacatctccagaacggcggtgtttgcgtatgcgacttttccctgcatgtctatttcaatcatcagaacggggatgttttcagcgatttctctgaaagctgccgagtcgattcgccccgacagacttgtcggaggcggatatgaagagttatcgggggacgattccagccgcgcgcgcaactccgcgacctgcttctccaactcttcgtatgtgggcttcttttcaggcatattcttattatattctttccggcttccgtcccgcgcgcggcctaaaatatcgcgcgctatctcaggaacataaacgccgaaatggcaaggcccgccacggccagcccccatgtccatgccagcgttttccgggtgaagacctgaacgtcctctcccagaaaacccgcgatccagacattgtgcgtgttggtcgggtcgctcacgccctgaatcatccccaccgagtagaacgccgcgactaccgccatcggcggcagcgcgccggtggaaatcattatcgccgctatccctattcccatgccccacacgttcaaaggcccccggtacaaagccaacggcgcgagcgcggtgaaaacaatcacgtagagaaccggcgcgctcggcgctatccgcctcatcacaggctccatgtatgcgccgaccgccgggtcccacacaacgcgtatcaccatgcctatccctatgattagcgccaccacgggagcgacgcccgttatcccgtcgaacaccgctttcgtcaacctctgaatcctgccgttcgggccgcggccggacacgatcaggcagtacagcattcccgcaagcagcgccgtgtttatcgggaacgcgtatcctgcgccgcctctcaaccggctggcaatgttgaatcccagaacgagagagagaggaataagcggcgtgagaaccgccagaatcccggcccgccccgcgtcccctgccgccgccgcgcctcctcccggcggaaccgcccagaaggatgtgtgaccccgacgtccgtgcaaaatgataaaaccgaggaccaccagcgcgaacgggatcatgaaaggcagaataaaacctatcaactgattctgagcgtcgatcgcgctcactgtcgagcttgccgtcattatctcagtgtaaaacttccagttgaccgggttcaacgctccgccgaggctcattccgaacaggaacagagagcctgcgactgcgggagtcacgccgatgctcatgaggatcggcagcattatagacgccaccataatgaccgctccgaggcccaccaatgacgagaataacagcgccgtcacgccggtcagcagcacgcacgacacgatcttgttgtcgccgcccagttcggacgcccatctgatgatcgtcgtggttgctccgctcgacttgagcagttcggcgagcgccgcgccgagcacgactgtaataaccaccggccacagcctcggcattccctcttctatcacaactctgaaaaattcccgcgccagaacgacggcgttcgatcccggatagctgaatgaaaggccgtggtagaaagctccgcccacgatgtacagcgtcgcggccatcagcggcaacgctatcagcgcgggcagtttccccagatacatcagcgccgcgaaagccagaaacactccgaacagagcaagccctaccgccatttccattcgcgttcacctttgttgattagtctattccgcgacttcgcggagcggcgagtctcatttctcgccgttctcggattgcggccccggataagacgatcttttgataatcaccgacgctatcctccgcccgaccatccgttccactttcatctcgtaaccttcgatatcgactgtctcttcctgtttgggaactttgcccatcgtatgaaaaatcaatccgcctagcgtttcgaactcttcgtcgtcgttgaactccgcgtcgagaatttcgttcagttccgcgatgtcgatcctagcgtccacgcgcaaagtgtccgagtccacccatctgtaaagaggctcttcggtgtcgtactcgtcccatatctccccgacgatttcctcaaggaggtcttcaatcgtcactagtcccgccgtgcatccgtattcgtcgatgactatcgccagatgcgtccgcttcttctgaaaatcatgaaggagatcatccaccatcttggattccggcacgaaataagccttgtggacgtaatctttcactgggtccgagtcgcgtccgtctttcagagcgcgcaacagagtccttgagttgaccacgccgatgacgttgtcctccccgccttcgtaaatcggaatgcgggaatgcttgtgctcttccatcagaaccgccatgcggtccaccgtagtgtccgccggagccatccgcatgtccggcctcggcgtcatcacttccctcacctgcgtttcgccgaattcgaccacgctgcgtatcatttctctttcagttttgtctatgatgccctgctctccggcatcgtccacaattcccagaatctccgactgggtgatgaacgggccttccgccgggcctgacttcccggtaaatatcctgagcgtcagattggctatcatcacgaacactttgcctatcggcgacacaatagcgtgaaacgtcgaaatcggcttgatcatttttatgaccacgcggtccgaactgttatatccgaccatcttcggaagtatttcgcagaaagcgattatcacaaacgacgccaccccgaaacttatggcgggaccgacccatgaaggccaatcagtgtgccccagcagttcttcggttatgttttcggtcattatcgcggccagcaggtttacgccgttaagacctattaaaatcgaagtgagcatgttgtttggtttggtcaaccagttgtcgatcgctcccgctcgcgcggggtgctcctctttgagggccttgagccggtgcctgctcatcgtcaccagagccgtctcggacgccgaaaagagcgcgctagccaacagcagtgcgaaaagaacaattatcgccagagtcattattttctcccagcgtcatattagaataacaaaaaatcaatgtcaaacatcgccgtctccgcgcgctaccgtgtccgccgtcaacagctccgcccggaataaacgcctcaactctacggctgtcaccctcgccgctcccgccgtcgcgctccgctgcgccaacatggcggacatgaattttatgagcggaaccgaaggcagcctgttgcgtttgcgcagacgagcaagaacgaaaaagaaaagaatcgctccgtgaaaaatggcggccctcaaaaatgcggcagctccaagcggcaaccccttcacggccacgccggtcagatgtatatacacttcctcgacgcccagcttccgcgccttgccgctcgtgcttgccgaatagcgatgtctaactttcgcgccgggcgcgtagaaacacttgcggcccgcaagagccgcccgaaggttcaaatccgtgtcctcgtaatacgcgaagaaattctcgtcgaacagccctatctcgtcgaacagcgatttcctgtagagcgccgcggccgcgcatggcccgaacacccgcgccggaaggttgtaatcccccccgtctctctgtccgcgcccccggttggagacggctccccacggcgcgtactcatcccccgccgagtcgattgttttagggtcgtcgtaaaaaactatcttgcacgcgaccgaatcgaagccgtgattagaatccagcgccgcgaccgctttttcgagccagtccgggtctggaaccgcgtcgttgttcagcagcgccacgaactcggtgtccgccgcgcggatgcctttgttcaccgcgcgggcaaatccctcattggcgctcgattcgattaattccacgtcgggatgattgttttttattatttcgcgggagccgtcccgcgacgcgttgtctatcacaataactcgctgcccgcccagagtctggctcgcgagcgcgccaagacattcgccgatatatttctctccgttccagttcgggatgacgactgtgacgcgttgcgggttgtccatcgagttcgcgctccggcgcggcgcgggcgttccgccgcccttgcctgccgtgttcaggttgttcttctctgcggctgtttctgtatgcccgtcatcagctccaacagatagtccctgtccatagacttgttcatcgcgtcctctttggtgatgatgtttttcttcatcaactcataaagggcttgttcgagagagagcatgccgatgttctttcccgtttgaatggaagcggggagttggtaggtttttccgtcgcggatgaggttgcgcagcgcccctgtgggaaccattatctcgaatgctgcgacgcgcccgcgccctgccgccctgcggaccagagtctgcgagattatcccctcgatgttctgcgacacctgcatccttatctgcgactgctgttcgggaggaaaaacgtcgatgatgcggtcgaccgtctgggccgcgcccgtcgtgtgtagcgtgccgagcacaaggtgccccgtctcagcggtggtgatcgcggtggaaatggtctcaagatctctcatttcgccgataagcaccacgtccgggtcctgtctgagcgcgctcttcaacgccgccgagaacgaccctgtgtcccgtccgacttcgcgctgattgacgaggctcttcttgttctggtggacgaactctatcggatcctcgatcgttattatatgttcttcgcgggtcgcgtttatgtggtctatcattgccgctagagtggtggacttgccgctccctgtgggtcctgtcactaggataagcccgcgcgggcgctcgcagaacttcttcaccaccggcggcaggctcaagtcctctatcgaccgaacttttgtagggatgactcgcagcacggcggccttcgtccctctctgatggaacacgttgacgcggaacctcgccttgcccggatagtcgtacgcgaagtcggactcccacgtctccctgtattccttcgcgtgctcctcgtcgagcatgctgtttatcagctcgtccatcgtctggggcgtgagtttcgccagattcgtctgaagcgcgattttcccgtctatcctcaacatcggatggttgccgactttcatgtgaaggtcggacgcgtcgaactggagcattacgtccagaagctctcttatatgcatctgctgttatcctctgcccactagtttggagaattcagggacgttctggcatttcgccaccgcgtcttcgaacttgacgagccgtcgtttcatcagttcggccaagtgctggtccagcgtgtgcatcccctgctccttgccggcctgaatcgcctgatgaatcatgaagaccttgttctctcgaataagactcgatatggccgagttgatgaccattatttcatgcgcgacgacgcggcctttccccgtcgccgcgggcacaagcgtctgagacaccacgctttgcagagtcaccgaaagctgcattcttatctgctgctgctggtgcggcgggaacacgtcgatgaccctgtttatggtctgaaccgcgcctgtcgtgtgcagtgtggcgaacacgaggtgcccggtttccgccgctgttatagccatcgagatcgtctccagagtgcgaagctcgccgacgagtatcacgtccgggtcttcgcgcagcgccgagcgcagcgcgcggtcgaacgacttggtgtcctgcccgacctccctctggcagacgctgcagttcttgtccctgtgcagaaattcaatggggtcctcgatagtcaggatgtgctctcgccgagtctgatttatgtggtctatcatcgccgcaagagttgtggacttgccgctgcccgtcgggccggttacaagtatcagccccttcgggcggtctgaaagctcttccagagtgtccggcagcgccagttctttgatggtcagtatttttagagggattgttctcagcaccgccccggtaagcccgctctgcttgaacacgtttacgcggaatctcgacactcccggcagactgtatgacatgtcgcactcgttcgtctccacgaactcgcgcaactgcctctcgttcatgatggatttcgccatcacgtccacaatctgcgggggaaggacggagcgcgggtcggcagggcggagccttccgtccagacggaagaacaccgggctgttccctttgaaatggacgtccgacccgttgtgctcggccagatacctcaggtacgcgttcagcctttctttcggcgctatgttctcttcgagcgaaggcagtaccggctgcggtttctgctgttgcggttgcggtctttgcatcgacatttttctatggcctcaaattctgcgcttccgccgggcgcgtctcgcgccgccttcggcggttatttcaaaaatcgtccggccgacagtcttacgctgtcagcgccttcaacacgctgccggccgccgtctcagagcctctcagcggccgcagatatctgtccttgtccagcttctccagcgtgtccctgctccagaacgagcaagtatccggcgtgagcgccccgcacacgcggaaaaagtcgttcgagtccttcccgaattcgagatagtaatccgccagagcgatcccgcgcttgtaaagaaacggctgcagagccttgttgacttgagccgccctcgttctcatcgtcttcacgtcgccgtccgtcacttccgtgtagacgcgcgcgcgcatccccggctgaaactccttgaccgcgtccatcttcacgttgaattcgattatggtcacagggagtatcgagcctgcggcgagacgcgtgcgggcggcgaactcatctgaaaccatgttgcgcaccgccacgcgggccgggattatccgcgccgcgacggtctccatctcggactcgcccgtctcgcgcgcgaaatgtgtcgccactccgcaatcttcaagcctcttgaagagcgcggcggcgatcttcatgttcaacgcgcctttgcccggaaacatgggcgacctttccgcccagcattccaccgcgtcgttcgtgaactcgaccgcgaaccggtcgggggacgcgtcagactgatatacccgcatccccggcgtctctcttatcaaagcgcctttccccatgtctttaccccgcgcgggctattccttcgccttccgcgcccgcgctttcttcttcgggaaaaatctctcgtatatttcgtccacgtgccttatgaaatactccacttcaaaacactcctccaactcggcgggtttcaacagcgccgccacttcggcgtcagccgacaacagcgacttaaactccgccttctccgcccacaccctcatcgcgttgcgctgcacgatgtggtacgcctgctccctcgtcggctcccttgcccaccagcgccagcatcacccgctgcgagaatatcaagtcccctcgtcttgttgaggttttcaagcatcgcgtccggatacaccaacagcttgtccagaaggcgtttcagcctgaccagcatataggtgaagcagtatgcaactatccggaattatcaccctttccacagacgaatgggtgatgtcgcgctcgtgccagagagccatgttttccatggcggcgtgggcgttggcgcgcaacacgcgggcaagcccggccagacgctcggctgtgatcgggttcctcttgtgaggcatcgccgacgagcctttctggcccttcgcgaagaactcctccgcctctcgaatgtccgttcgctgaagcccgcgaacttcggtggcaatcttctcgatagtgccgccgaccaccgccagagtcgacatgaactcggcgtgcctgtccctctgaatcacctgcgtggcgataggcgcggccttaagcccaagccttcggcaggtgtcttcttcgacatcggggggcaggttcgagtaagtgcccaccgcgcctgaaatcttgccgacagatatcgtctcgcgcgccctttcgagcctttcaaggttgcgccccatctcggccagccacagcagcatcttcattccgaaagtcatcggctcggcgtgtatgccgtgcgtgcggcccaccatgacggtgaatttgtgctctatcgcgcggcgctctaaaatgacgcggatttccttgacctccgagatgagagcgtccgcagactcgcgcatgcggagcgcctgcgccgtgtccagcacgtccgacgacgtcatccccacgtgtataaatctcgagtccggcccgacattctccgccacgttcgtcagaaacgctatcacgtcgtgatcggtctctttctctatctcgtctatgcgctgaattgtgaacgccgccttctttttgatcgtcgacagcgctcgcgcgggaatttttcccttcgcgtgccacgcctcgcacgcggctatctccacgtccagccacttcctgaacttgttctcttccgaccagatcgagcgcatcggctcgtatgtgtacctgtctatcatctcgtcgaaccgccctccgaaaagtagttcctgtagcccaaagtcctcaggcgttcggatttcttaattacagcctcagcctgctgcgccctgaacctgctgtagcgcgaggcaagctccggcttgcccagagccagtatctgaacagccagcagagccgcgttcttgcatccgcccacggccaccgtcgccaccggcatcccggcgggcatctgagctatcgacaacagcgagtccagccccagcatcttcgactccatcggcaccccgatcaccggcaggttcgtgagcgccgcgaccactcccggcaggtgcgccgccgcccccgccgccgctatcatcacttttccgccattgttgtcaaacgtcgtcactattcttttgacatagtcgtgcgtgcggtgcgccgacgcgatatgcgcctcgtacgacacgccgaaactgtccagcgtttcaaaacacgccgtcatgcttttaaggtcggaatcgctccccataacaaccgccacatccggggcctgcgccctcttctgcctagcggcggcctttttcttcttttccatttatcatttttctcccttgagagtatttattctggattttctgatgtttcttttcggagaaaccttcggcagctcgtcctccacctccactcttatcgacgccacgccgtccaaagcccagcccgtcagcttgcccgctcttccgcccctgttccggtcttcgtcttcatactcttcgtcgtcttcgtcgtccggcccggagaaccctaatgactcgatgttcgccacaagctcgttgttcatcggacgactcgaaaactccttcaacacttcatccagacttttctccttctttctttcgcgaaggaaatgagggtctttttcgtcttgtctttcctgcccctcgacttggatttttatcagcaacatttccggagccgccgacggaagctctctggctccggagaaaacgcttatcaccgcgcgtccgggcgctatgtcggctggcactttcaaccatattttttcctcgaccgtctcgctcctaaacggccgcacccccactttcagccccagcttctgtccgcgcttcaccacgggcggacttgccttttctttgtttgccttttctccagccgcgttcggctctttttcttcggctttagcttccggctcggcggcgggctctttttcgcccgtcttcgtttcttccgcttccggcttctcttcgtccccgccgtctatctccactttttctataagcgcgtaagagttcctcgaatctatctcgacgttcaggttcaacttgcgcgcttccgcgtccgcgtatttgttgtccttaagcaattgaagcgccgtcacgaactccaccagagacaacgccgcgatgtcgtccccgtcgtaaaacatgttttccctttcgaccggtttttcgcaggccgagcatcctatggaaaacgacactctggaggttcctttgccgagcctgtcgatggtgttgtcgagactttgcagcgcggccatcgccgccagattgctcaacaaatcctcgtcccgcgccaccttgaacgaatacttctccgtcttgccgatatctccgtcagtgacggttatgtcgaatggtatcagcagaggaaaactgtccagccgtcccacaagagcggggccgcggtcctgagttatctctcctcgcagcgccccggtcgcggcggctttgaacgacatgtcagtgcctcgcgccaccgcgagcaccggcgcgtccgccagcagataccttacatcgcccttcctgaacagcggatgcccgaacatcagggcttgcttgccgtccacgtgcgtcaccgttcccgccgctgacacttccatatctcccgtcagaagcagcacggccaccgaactgccgggttttatctccgagccgggtccgattacggtgcgtcccgttttcgccccagcccatgcgccgcccgcgtccgtcacttctattcccgttccctcgaatattctctttgcaaaaggcatcgttcgcgccgtcaccccgcgaaccatcgccggagccgccgccgcgctcgcaaataatgtcccctctatctcgtccctgccggattcataacttattctcgtaaaaacctttccgccatgctcgaaaggcgcgtcgaactcgaccgtcccggccctcggcgcgtcatactccgccgccttcagcatggacgcgatatccgtaactcctcccagatggtggtccgtcatcggaaacgtcattgaaagcgcgccgacaagcctgtcgccgatatatatcggggaaccgctcatccccattgacactccgccgtatttctcgcgctccggcccggtcaactctatcagtatcagcggccccccgctgaccccggcccccggcataactcctttaactttcaccgggaatttcgatatctccagcccctcgaacaccgtcagcccgtatccttccattccgggcttgacctctgacgcggacatatacgaaacagccggagccgccccggcgacgcgcgtcatcgccccggaaacgaccgtcacaaaaaccgccagcgctccgagaattatccttgcttttgatttcatcattatgttccgccgcgaccgcgcgcctattaaaaatccgcgtggcgacgcggcaacaatctcaacatcaatacctcgcgcgcagttcccgtcgcgcggttaagtctgatattatatctcattatcaaatcaaattaaaacccccgtccgcctctccccgcgccctcttttttcgctccgatggcgctatccgccggaaatatgtaaaattccatataagttgtcaggcttttagccggctccgggagatttgttcatgattatcaataatttcaaagtcgaaggtttcaggtccttgaaaaaactcaacctagaccttatgcctataaacatcctcatcggccccaactccagcggcaaaagcaacataatcagcgcccttgaacttctttccgacgccgtctccggcaaactccgcgacgccattatgaaaaaacacggcggcatgatccccattctttggaatggaaccgcaaaggaaatcggttttgaggcaacaatacgctctcatcgttttggtttcaacgaaaacccggaagaaaacgcatccgatttagtgaaaagacgatatgtttatagtttaaaacttgaacaattgagagcctcaagcgaatatggcattgaattagaaaaactccatgtcgagaatattgccaatgatgatgatttatccaattacacaggcacgattattaacagagatggaaaagaatatttcacgaaagaaattaatagcgatattccagcggctgtgttcgatatttttaaagatagcgaatccatgttttttaatatggattcaatcaaaagtggatggaaaaattatactgaattacaaatatataggttcatcaatttttttaatgactgttcattttaccgaaatctgaatcatggcccggaagcagcggctagacattcgactgtcgcgaggtcggaaaaggtgttggaatcgaacggcgataacctcattgccgtccttcacactctttacaccggcaataaagagttcaaagaacagtttaacaacactctcgaagcggctttcggcgacgactttgaagaactgacattcccgcctctcgaaaacggcagaatctatatgaaatggcgctcgaaaacgcttaaacgcgagctttcacccgccgacctgtctgacggaacgattcttttcctgatgctttccgcgattcttctctccccggaacccccgccgataatctgtatcgacgaacctgaacttggaatgcacccttctatgctcggcatcatcgcggagcttatcaaagacgcgtcaaacagaactcaacttattgtttccactcattctcccgaacttttaagcgccttctccgacatgccggaatcagtcgtggtcgtggaaaaaaaagacggcgcgaccactgcgaaaagactcgaccgcgattccctttccaaatggctggaggaatacaccctcggcagattatggctcgatagagaaatcggcggatgatccatgaaaatacttcttttcgtcgaaggcgataccgaaaacaaaacacttcctgattttcttaaaaaatggctggattccaagctggacaacaggatcagcgtcgaacctattgttttttcgggttgcggcgattatttaaaacgcgccggcaaaaaatctcaattacatcttgataatagcgaagtaatcgccatcttcggcttgctcgacctttatggattgcccgaaaagtgcaaaggcggaaacactgtcgatgaaaaaatcgattttgcgagaaaaagaatcatagaatctttgccggaagaatgcagacctagattccgccagcatttcgccgttcatgagctggaagcatggttgctcagcgatcccgatatattccctcgcgggatcaaactgccagttgaatgcggaaatccggagacagtcgacttcgataaccccccggcaaaacttctcaaggaactttttaggaaatataaaaaaaattacagctataaaaagaccgttgacggcgtcaatctgtttaaaaaactctcgcctaaaaccgtgcggaaaaaatgtcctaatttcaagaagtttaccgatgaaatactggcagccgccgaaaacgctcagaagcggagccttcctcgttgaaatcggaggccggcatggatgaaatcatgactcagtcgacaaaaaagaaaatcttcatcgtcgcgggggcgagaccgaacttcgtgaaagtggctccgattatgcgcgcaatggcagaaagcccctccctgcgccccatcctcgtccacaccggccagcactacgaccacaatatgtctcagagttttttcgacgagttgaacatcccccggcccgacgttttcctagaggtcggctccggcagccacgcggcccagaccgccgccgtcatggtagccttcgaaaaagccgtgctcgaattaaaacccgacctcgttctagtggtcggcgacgtcaactcgaccctcgcctgctcgctcgtgtccgcaaaactcatgataccggtcgcccatgtggaagccggtctccgcagcttcgaccgctcaatgcccgaagaaatcaaccgcgtcctcaccgactcgatttcatcttacctcttcgtcaccgaaccgagcggacgcgacaacctcctgcgggaaggcgtcgcggaagacaacattttcttcgtcggcaacgttatgatagacactctggcggaaaacgcgcggcgagtgaagaacggcgaggcggtccgccctctcggcgatttctccggcgattacgccgccctcacccttcacagaccctccaacgtggacgacccggcgacattctcccgcatcatatccgcccttgaggccaccgcctccatagctccggtcttttttccggcgcatccacgaactgtcaacaacatccgcagattcgggctggacgaccatttcgcagcgtgggacggcgcttcaattcccgccggaaaaatcttcatcatggaacctctcggatatctggaattcctctcccttaccatgaacgccaagatcgtcctcaccgattccggcggcattcaggaggaaaccacttggctgggcgtcccgtgcgccacaatccgcgaaaacaccgagcggcccgtcaccgttgacgtcggaacgaacatcctcgtcggctccgacgccgaaaaaatctcccgcgccgccgccgccgccctgcgcggcgactggaaacagggccgagtccccgaactctgggacggccatgccgcctcccgcatcgtctcaaaactggaatctctgttatgttaagtttgtatcaacatcgccatacatctggttttcatcgatctaagaaaaaagccgattttgcaaagaacgaagttcagcaaaatcggcgaccaagagtttttttcggaaggggcgcggggaaacctgttttttgcaaaaaaatggtttcaccgcaaattactaaaaatctattatccatatattattttttccctcgctgacattgcttttcaataatgatacaatacggttgcggaggaatccgcgcgctatattggcgtacccggaatgttttcgggcatgtttaactgcggcaggttgtcttatagtgtctgatttgctgaaaagaaaaattgttattgcggcggcaacggcattggccgttctcgcgactctgtccgccgctgtgcccgcgcgcgctctcaacctccactacacaatcaccgcaaactacataatgttcgacatagaccgaaaagtgatttactgcgacggacaggtcgagcttcttcacggcaaccttcgctttcaagccgactcgatacgggtggacgtgaaatcgcacatcttctacgcagaaggcggcatcgtcgcttccactatgaagaaatccgcttccgcgctgccgggcgacacggcttcgccgtccaccaaccctatattgacggacattgaagaaaccggcgacctgctcgaccagcgcgtcgaagctcagatcacaggcatggacggcgcttcattttcaggcgaccaacttaagttcgacttggatcgcgcggcgggcatcctcactcaaacccaaagcggcgtcaggactttttatctggtcggcgaagaactcaacgagacggcccaagagcctctgatgggacaggcgttctacatctacgaagagccttatctcaccgcaaacgccgtgaccgccgcccgcatgcgcatctatcccggcgaccagtacgaagcgtggcgcgccaccatgtgggtaaaaggcaacaaagtaatgtccctccctttctggaccaacaccagcaaaaaatacaccaccggcaaatggcgcatccggaacgtcagctacggctcaaacgcggactggaaagtcggcgccaacgtgcgctacaaggaagcccgcgacttcaaaggcttcgtcgatttgaactaccacggggacagctcgaacacatattccgcggacctgcgacagtcgttccgcatgaacacccagacaagcggccagttcaacatgcgcaacctgttcggcggagacaggggctacaccatgtccatgtcgcgctacgccgccggcatgagatcgcaaacccttcagatggactacgacctttccggggcgaaaggattccggctcggagccgcgggcggcattaagaaaaccagaataaacggctacctctcaggccgcagaactggagacggcgactacggccaatcatccatgaacgccctcgtcagcttcgacggcaacagaaagttcgtcaatggcaacacgcggggcgtcggctattccgtaagctctcacataaaaatggacaacttcgattataccgacgccgtgacggcggcctacaccaccctcaccgccgtcagcccttcaatcgccctgtcaaaaaagaccagcattgattggaacacagccaccgggcttggcggcgacaccgaaggcaggcccagcgcccgcctgtccgcctccgcccgcatcggccacagaccccggcagggaatgttgattcaggcccgctataatttcactgacagcagatacaccggctcctccaccgtcaaacgccagcttatgttgtacgtgtcgaagtccaaagggcttaagtggaattccgccctgtcggcgacttatgacatccgcgaagcaaccatcagcagcctgtcttccggcctcgattacaccgtcaacaaaaaatgcagactccgcacggacttcatttacaatctgaaaaacaaccatttctccaccaagaacttcaacgtcgactacgacctctacggcacgcgcatcaacacccgctggttcgccgacaccaacgatttcatgatcgacttcacatcaaattactaagccggatttgcgcaatactgttcaataatcacaaaaataggagcaatagccgaagcgccatttgattttacccattgcgccgagcgccgctcccaaccatattgtgaacgcatagcgaaaaacggggacttgcagcgctgcatttcgcgacgggtgtccgtttttctcaaagtcaccgcccattgtttcctgttaatatcatgtagacaatggctaaacataataaaataaagcttatagacgcaacaacctttatggcaatgtttacatcttgttcatcaagatatgtttgcttaaacgcaatgttttttcttcttgtcttgatcgccaacgctaaatagtatttaataaagacaaaaagatttataattaaaacaatcaaagcaattggatttatgcaaagcttaaatgatagatcttcatcagacacatctcttgtgagcatcataacgaaccatgccacaataacatttacaaatgctaaatttttaaacgcgcgatgtcttttctttattacattgtatgccacttcgataataaccgctgttaataataacaataagaacaacattgctaatatgcgccttcacaattataatctgctcgattttctcttttgattctaaaatacgtttctacttcgtcgatgacttctgtaataacacgaccagtcgccattattagccaccagttcttttcgttctgcccataatggatgcgcgatggattggcaaaaacccaaaatggtcattcacccatttctgagcgagtcttggtcatgctttacggtcgattcggttggttttccgggctgctttcgccttccttcttttcctgatctttgatctttccaagaaattcgggaaggctgactccagccatctcgcagacatcgtgcatcgcaggcagcattttcgtgaaactgcctaaccagttggacgctgtcgagccgccgccattgccgccgccgccgcagtcccacactacgatcttgtcgaatttaatgttgcttatcgcttctgcctgcgcttttacgatttccggcaactgctccactatgagcaacatggcggctttttccgcgtcgccgttcgcggcttttaccatctccgcgaagccctcggccttcttctttaggatttcttggatgcctgccgcttctccgctcagccgctctcttatttccgcgccttcaccctgtcctttaagtgtttgttgttcctttatcgcttccgattctatgattaatttttctttttctatctcagccggcacaaccacatcggctttgcgggtggatttttctctatcagccctagcttcctccgcttttttctcggctatgtaggctagggtggcggcctcggcggctttggttttttccgcggcgacggcctttctctctgcttcggcttccgcttctcgtctgtcagcgttcgagttggcctcgactactttagcagtgttctcgcctttaatggcttcggcattggcagtggcaacgttaacgcgcatctgctgttgcgcgttcgcttcgccggttttgccgtccctttcagcatttgcaatattaacgcgcatctgctgttgcgcgttcgcttcgccggttttgccgtccctttcggcatttgcaatattaacgcgcatctgctgttgcgcgttcgcctctccggtcaggccgtctttttcggcgtttgcaatattaacgcgcatctgctgttgcgcgttcgcttcgccggttttgccgtctctttcctgctgggccacttccaccttggctttgtttatagcctcggcagccgcttttttccctaacgcctctatgtatcccgattcgtcggagatgtcggtgatgtttacattgattagcttgagaccgagcttctcaagttcagattcaacattcttcattacttcttcttcgaacttttcacgtttcgcattgatctcttcaatactcatcgttgctatggtagcgcgaagttgcccgaaaataatgtctttggcattttcctcaatttgctccttgctcatgctgagaaggcgttctgcggctaccgtcataaccgatgggttggtggaaatgcctattgtgaatcgggatgggacatccaccctgatattctgattcgacaacgcgtttttcagaccgatgtcgattgtcatcggcgtgaggtcaagatattcgcaagcctgaaaaagcggccagacgaacgctgcgccaccgtgtatgcacttcgacgtttgacccttcgccactttgccataaacgaccatgatctggtccgacggacaccgccggtacctagtcatcgcggcgagcaaagtcgcgaaaagcacaattgctactacaacaagaccgataagcatgtacatttaataatcctccgcaagaaacattatttgattttttcaatcaccaaggtttgatccccgaccgtctctattacttttatctgttctcctttatttagcctatctccctttgttgccgcatcaagctctaccagtcttccctgaagaacaatattgacctttcctctgccattcatgttttcgggcactgctatcgttacagagccttcttttccgacggcgtttttcagcgacagagttccgctgcttttcatggaagaaagccctttcataagcagcatcaccaacgctacggttacaactccgcaaacaccggcgatgattaccgtgatcgacttcgacaagcctttctccaagcaggccaaaccaaaccaagagaaaccgaggaaaaacgccaccatgtttctgatggtaaaaaaaccaagaaataaatcgctatgcgtgtcgctgcccggatctacatctccggagtcgatatcgtcgccccctgcgaaagtgaatatgagctggagcaagaaaaacaccgagaatacaacagcaacagcccaaaataccttttcaaaagagcttaatgcaccccaccatgcttccatttttcaccttcacaaataaggatttcacctaacattattcgcaaacatctaaaatgtcaataaatgagcctgtcattttgccttgatgtggtgtctgtagtgataaagctattcctgcatttcaatatttccatcagtcaccccgagatgaatcagagcaaaaccgggaaccaccacaatgctaaacaactaaaattgctagaatatcccggtacagccgcctatttacgcctcctttatttttgctgttctcgcatggtgttactataccatatcgggcggtcttgttgtcaatcgtcttgagcttccccccaaaaactggacagaggtttaaggtggaaaccgtggtggtgtagaatccagttttggagggatgagcgatgaggaagaaattcaccccagcgttcaaggccaaggtggcgcttgaggcgctgaaggggcagaaaacggttgccgagctggcgaagatttacgaggtgcatccgaaccagatcgggcagtggaagaagaaggtgctggaagaattgccgggtgtattcaacggcaagcgggccagagaggacaaaggccgggaggagcatgtgggggagctttaccggcagatcgggcagcagaaggtcgaattggactggcttaaaaaaaaatctggacttgccgactgagcagaaacggcggctgatcgacccttcgagagaggcgctgccggtgtggcggcaatgcaaactgatgggactggcgcggtcgagttactactacgagccatgcggggaaagcgagtacaacaggagcctgatgaagctgattgacgagctgtacacggagcatccgagtctggggtcgccgaaggtcacgaagctgctgcgaaacatggggcacgaggtgaatcacaagcgcatagagcggctgatgagggtgatggggcttgcggcggtgtatccgaagccgcgcaccagcattcccgacgccgcggcccgcaagtatccgtacctgctggcggggctggcaatagagcgtcccgaccaggtgtgggccacggacatcacgtacatccgcatgcgcacagggttgcgtatctggcggcgatcatggactggtacagccggtacgtgctctcgtggcggctgagcattttcatagacgcggcgttttgcgtggaagcgctggaagaggcgctttcgcgcggatggccggagatattcaacagcgaccagggcgcgcagttcaccagcgaagcgttcacaaagccactgctggacaggagcgtcgccatcagcatggatgggcgcgggcggtacatggacaacatcttcgtggagcggctgtggcggtcggtgaaatacgaggaggtttacctgaaggattacgccgacgtatgggaagcggagcgtgagatttcgagatatttgcgctggtacaacgaagtgcgccctcaccaggcgctgggctacgcgacgcccgcccaggtgtactttgaccggagcgtcgaaattggcccgcagggcttgcgaaacagcgcggcgagtgatattgtggcggcgtaaaagaaaacgcgccacagaggaatggaggggcgttttacagagagaaaaaccgcccggcgacaggaggtggcaaagcaaaacaatcgaatgcggggacttgggaaaactcctcgcgtgtgagcacacgtacacgcgcgcgcgcacgcatgatgcgtgcgtcaggaacaggcaaagtcaaaggcaaaagactaaaacctacaccaaaccccaccttataaacccccattttctgtccaaccaatggggggaggttcctctgtcgctctttgggttgataataatagacgtctgttctttgatagaaacatccgatggttatattttttattgcgcatcagttatcataaaacaaaattgagaagtttgggaaaagggggttggggaaagaacccttttcaaagggtttttccccaatcgccaaaagcgacagtctcttgtgtcggtttatcaggattatacagtttttcggatttatacagtttttcaggtttagaccgggtcaaccgcgtcgccgagcagcgcgcgggaaaattcggaggcgttgaacggcagcaggtcttccatcttttccccgacgccgacgaacataatcggcatgcgccattccttgagtatggagaatacgaccccgccgcgcgccgttccgtccatcttcgtcagcacgagggcgtctatcgggacggcctgtccgaactgctgaacctgattgtatgagtttcttccgatggtggaatcgaggacgagccacgctctgaagttctcgaccccggctttttccaccgccacgcggtggattttctggagttcgcgcatcaggttggattgagtgtgaaggcgtccggcggtgtcggctataagcaggtcggcgccgcgcgcgcgcgcggcctgtatcgcgtcgtacatgaccgccgagggatccgcgccctctctctgccttattatcggcacgtccgaccgcttggcccatatctcaagctgctcggaagccgccgcccggaacgtgtcgcaggccgccagcatcaccttgcgcccttcggctttatagcgcatcgccagcttgcctatcgtcgtcgttttcccggagccgttcacgcccatcatcatgacgacgttcagcccgggggccaaaggctccgccgcagcgcccgattcgagtatctcggagagtatgtccacgatgagcgcgtttagcgcttccgcgtccggcgggcgtttttcgaccgctttgcttttgatttcatctacgatcagcgcggcggtggacgcgccaacgtccgacaacagcagcgcttcctccagcctctcgcagaactcgtcgtctatcttcacggcccgccctatggcggctgatattttatgccgtaagctgtcgctggtcttcttgagacccttcttcaatctgtcgaacatggttgttattccatggataccgtaaggagcttcgagtatccttcctgtttgtccattgttatgccgaacaattgatcggctcccaccagcgttcctttgttgtgggtgacgaccagaaactggctgttggtcgaatgttttttcagcatttcgcggaaccgcacaatattgctttcgtcaagcccggcgtcaacctcgtccagcacgtagaacgggctgggtttcactttgagtatggagaaaatcagaaccagcgcgcaaagggctttttcgccgccggacagaagggttatcgccctcatcctttttccgggaatctgcactgaaacgtccacgccggattcgagagggtcgccgtcgccgacaagcatcagctccgcctcgccgccgccgaacatctcgacgaacgtctcctgaaacttctccctcacccgctcgaacgtctccatgaactgcgctcggctgcggtcgtcatactcgttcactatgtccatcagggtcgcgcgcgcgtcttcaagatcccctatctgctcgctgagcaggtcgaatctgttggacttctcctcgtattcgccgatagccagcatgttcaccggctgaagcgtctcgagctcttttttcagcgcgaggtagcgtccttttccggccgggccgccgtctgcggtttcctcaagcgcccgctcctcggagacatcgtcgaactcctccgagaactgccttctgatctcttcgagttgcgtttcagcgcgcgcgcacttcatctcgctgtccagcatcgcttctttgagttcttccagtcgggtttcaacagcgtgtatctcgccgcgcagccgcaggctttcgtcttccatgcctttgagagcggtccgtttctgcgcgagcgcggattccgcggcggcgcgcgcggccccaagctccttcgccagcgcctcgcccgctttcatctcttcggaagtccggagcctgtccgccgacagcttcgacttctccgcgtcgatatccccgcttctccttcgcacccgctccaactccgcctgcctgtacttctcggcgtcgcccgccgcctctatctcccgcctcagttcccccatctcgacgcgcagatcaacctcgcgcatctcccgtttcctgaacgcgtccgctatctcgtccagccccgactgcgccgtcttcaactcggcttcgaggctctttctcttttctgaaacttccttgaacttcgattcgagcttggcgacatccgactctgagccgcctccggttgacgcgcattcggccagcgctttttccgccgattctaggtctttcgtcagaatttcgacgcgctccacagccgccgccgcgcgctcgcgcgccgcggccagttcgatattcagtttgttaaattcttttccagacgcttcggacgacgacctcagcgacgcgtatttcttttcagcctcttcgcgcgcggcgcgggccgccttgacttccgcgttcttcttttcgagttcggactttagctcggccacgcgctctcttgcggcctcgctggtcggcagagcttcgcccgtgaacagcgtcccgttgataaaacacgccgctccgtccgccctcacaaccccggctcccgaaggcagttccgaaatcgcctctttcatctccgcgtcggtgtcgacaatcgcgaacattgataatacattcagcaactcgttcggcgctgcggatttgaccgaaaccgcgtccgacaggagccgtttcgcccattttttctttttgagagccgccgcagccgccgccccggctcctgagaaccagtcaagaatcagcctcgcggccccgccgtcggcggcctcttcgagcgccttccctatgtccgcggacgtcgaaatagaagcgttgaaaagctcgttcaaagcgcggcgcgcggcaggctcgaacccggttttgatctcaatctcgtcggcgagccgggcggtttgtttccctttttcgctcacggccatcaggcccgctacgcgttcgatagcttcgacccgcgccgacaaagcgttgcgctccgcgacgaccgcatcaagcgccgaccgcgctttatcccgcgcggcggaagtttcctcgatgcccgcgcgaagcttttccgcctgcgattctttttcgcggatttgtttttcaaattgcgaaactttttcgctctcggacttgccgcgttcccgcgccgccgacagcctgtcccgcgcggaatcgcgggcggaggtcagagacttcactcgcgcggccatccccgcaagcctgtctttcgccaccgccagctcgcccgcaaggctcgcctccagcttcttcaaatcctcggcttccggcagaagcccgtcgcgcttctctgtcaggtctttcctgttcagcttcagatcgtcggaggattgttttgtggcgttttcaagttcggcggcggcttcatcgagcctgcgttttttctgctcggccttcgcgcgaaggtctaatatgtctttttcgagatttttctcctgctttacgatatcggctttttcgatgtcagcggcggcggcccttctgtccgcgtcttccaccgcgcgggccagcagcctcgcggattcctccgcgcgccccagtttcgagccgatgtccgccaactcgcgcagagccgagtcgatttccgcccgcgccgcgtctatgcccgcacccacattctctctggactgtctcagctcgccgactttcttcagcccttccgccctctttgccttaaggccctctccctcgacggaaagctgttccaagcggctcttcaaacgccttatctcggacgcgaaaacgcccagcttcagcctttccatctcctcgactatctcgtcgtaccgcttcgccttttccgcctgctctttcaaaggccccagcgattcggagatctcggtcagaatgtctttcagccgggagatgttgatgttcgtgtctttgattttcgacagcgttttggttttttcgattttgtatttatttatcccggcagcctcgtcgaatatctcccgccgctgcgagggggacaagtcgatgacgtactcgacgtcgccctgattgattatcgaatagttcgtggtggacagtccggtgtcgatcagcaactcctgaatgtccttgagcctgcaagactcgttgttgatggcgaactcgctctcgccggatttaaagtaccttcgggttatcgagatttcgctttggggtagcggaaaatagccgtcgtcgttgtcgaaagtgaggacgacttcggcgaagccgaggggcttgcggctggcgctgccgtgatagacgacttcttcgagcttgcggccccggatcgagcgcatgctctgttcgccgagcgcccaagttatcgcgtccaccagattgctttttccgctgccgttcgggccgaccaccgcagtgacgccctcgcggaactcaaagaccgttcggcgggcgaacgtcttgaatccgaacattgacaccgatttcagatacattgcgggccttgttgttttttatcgtctcaggagccgtcggcgctcatgccgagtatcgccgcgcgcgccgcctccgtctccgcttcctttttgcttcgcccctcgccggttccgtgcgaggccccgttgatgaagacctccactttgaacatcttgcggtggtccgggccgttctcggatatcataacatatcgagggagagtcttgtggcgtttctgagcgtattcctgaagttccgtcttgaagtcgcgcgcggcctcgccgcccgcctcctcaaggaactcagacatccgctcgatgacgaaatcgcgcgccctctcgaatccttggtcgatgaagacggcccctatcagcgcctcgaaacaatcgaccacgaacgccgtgtggtctctgccggcagactcctcgacgcccttgccgacccggatgaaatctccaagctcgattcttcgcgcggctttcagcaaaacgcctttgctgacaatgtgcgccttggccttgctcatcgcgccctgatcgtcttccggaaaagatttgaacaggcgttcgcagatggaaagagctagaacggagtcgccaaggaattcgagccgctcgtagctgcgttcaagccgctcgcgttccggcagcacacacgaaccccagtacgacggatgcgtaagcgccgccctcaaacccgactggtcgttgaaatccacgccgatgattcccagcaagtcctcgagcggcctcgggaatccttctctgtcccgaacttcgaggggggaaaggttcaacgggtcacacctgccgttttttcagataatcggcggcgtctcccaccgtgactatcattaccgcgtcctcgtccggcacttctatgccgaactcgtcctcgacggccattatcaagtcgaatatcttgcgcgagtcggctccgaggtcgtccctgaacgacgcctccatcactatcctgtcctccgacacgccaagctccgccatgatcactttcttcaggcgatctatcatgtctgacatttatcgtcctgcctccgttatccctcgactttggtcacaagaacagtcttgcccttgtagtagccgcatttcgcgcatgcgcgatgcgtcatcttcacttcgtggcactgcggacattccgtcagcgtcggcgtcttcaagcctcttttccactgcgccttctggcttcgtgtgctcgaacgcgatttcttatatttcggaagcgccatcttctttcacctcccgctccatttttctctctaaaaactttcttccttctttcaccgtgctcataactttgtgcaatgtttgctccagattgtcaagcgtctggagggcatacatttccgcgccggccccgacgtcccctttgccggccccctcaggcgaagacattttctccgccgtcgcccttgccgagtcctcttccgcctcggcctccatctctatcctcatcgacctcatttcattgagcgtcgcgtatatcttcttttcgtccacaacgatttttcctataaatgaaaggaaaaaaccgctgtccagatgcgattccagcgtgtccagcaacttctgaaaccttgccagtttttctttcttcaatcccggcccgccttccctagtcgccttatcccgctctcacttctttgaatatctttccttcagcttcgcgtccaccatcggcgacacaagagaactcacgtccccgccgaaagacgccacttcctttattatcgaggagcttatgaaagaatgctccgtgctcgtcaccagaaacaccgtctcaacgttcggagccagtcttttgttcaccagcgccatctggaactccatctcgaagtccgtgaccgcgcgcagcccgcgcacaaccgctttcgctccgcacgccttcacataatccacaagcaacgtgtcgaaactctccaccttcacattggcgatgtccttcgtcagttccttcgctatttccatcctctcctgaatcgagaaaagatgttttttggacgggttgttggaaatcgcgacgataagctcgtcgaacaccgaggccgatcgctgcactatatccatgtgaccgttggtcatcgggtcgaaacttcccggatacgccgccatgttcatttttcgatgtccttaatgtttttccagaccgtcacccagcttgagccgtaccttctggagtcccgcattgaaagacttccgaactccccgcaaaccggtttcgctccgtgctgtccgacaatcctgccgccgtccgccagcatgtccgccagccccggcgattccatcgtcgcctcgaacatccccccgtcatacggcgggtcgaggaaaatcagatcgaaaattcccctcgccgcccctccggcgacgtattcccttgcgtccatccttataatttcaaccttgccctcaagcccgaatttactgacgttgcgctctaccagtcgtatcgctttcgacgagtgatccacaaacaccactctctccgctccccggcttaacgcctctattcccacactccccgctccggcgaacaggtccagaaaccttgctccgtccatcggcccggtcaggttgaatatgctctccctgactcggtcgtatgtgactcttatgctgtcgtctccatcctccgggccgaacagcttggatctcttcaaatcgccgccgattaccctcaaaactctctccggtcggttgcgcgcctaacccggatttttcgcaagaaaaacccggacttgacaagcgcgtctgcccgtcggacatccgcgcgaatccgtataatataacatatttatatattttatctagtatataaaagaactattatttttctgactctgccagtcaaagcacggttcctgcgcgcgcgcttgtaatctcatccttcataacggcaatttcgccgtttacaatcaccgcgtcgaacccgcacggatatctgacggggtcctcatacgtggaattatcccgaagcgcgtcagggtcgaacaccactatgtccgcaagataaccttcctttatcaatcccctgcgggcagccccgattttccttgcgggcatagacgtcatttttcttacggcctctcccatcggcatcagcttctctccaatgacataatgcttcaggaacctgaccgtcgtggagaacagccggggatgcgccttcgccccctcgtccgtctccaccccgtccgatcctatgctgctaagaggatgcgacatgatgaaccgcaggtcgtcttcggatatgaattcgcccgcgaccggggcgttgctgaaaccttcttttagaagcacatggagcgcggcggctttagcgcccttgcccgtgtccttcataacatccgccagcgtgcgcccctcgtactgcttcaattttttcagttcgaggaaaatcaccttttcctccatccccggctcgttcagcagcatcgtcgtggcgagtatgttggaaaacgccgtgaacggatagacatccgcctcgacgtccacgccgcgcgcgcgcgcctcctccatcatcttcatcgttttgcgcggcttgccccagtttcggctcaggattgccttgtgatgcgatatctgcagagacactcctgtttccatcgctatcccgattgcctcccggttcgcttcctcaagcttgtctatctcgtttctcacatgaacgctgaacagcgcgccgcgtttcgccgccgtcccgcagagagccttcacttcttctctcgacgaaaacatctgcatcggatacgccagcccggcggaaaaccctctcgcgccttcgtcaagcgacttatccagcaacgacttcattgcttctatctgccccgcgttcgcttttaacggcgaacgccccatcgtcatctgcctcaaattgccgaacccggtctgcagaaacacattcgctccgattccgatccttttgatatgttcgatatacccggcggtggaatcccattcaaactgacactctgttccaaacatgccggagaggtatcccctgaaatccctcctcagcctgtcgttcatcggcgctccggaaaaaccgcacgagcccacaaccgctgtcgtaaccccctgcctcagcttcgcctccattgagccgttcacggctatcttgaaatccgaatgcgcgtgcatatcaatgaagcccggacacaccatcttgcctgtggcgtcgatggatgaaagcgcgggatcatccgcgcgggccatggcgctcgcctcgtcgcccacagcctttatcgtatcgccttctatgtagacgtcgctcctgacgcccggcccgccgaccccgtcaaaaactgttccgcctttgatgtatatctttccttccatgcgctaatcccccgctatttcggacggcgtttccttcacttcgccgctacgccgttatatactatatccgattttatcgacactgcgcgcggagagataaaatgtcacaacaaaccgaaagagagcttgtttcgcggctcaataagaacatatccacaaaaaagaaatcccccggaaacagacgctgcgtcgtcggcttggacggattcatagacgagatagtccacgtggtggacacccgcaagaacaactccgaatacgagcggctcgaactgatgtccaactacgccgaaaggataaaaagctacgcgggcaagagcggcaacatagagtacgtgccgcagcgagtgaagatcggcggcaacggcccgattatggcgaacgccatcgcctctctcggtgtctcgacgacttatatcggaacgctcggcaggccggatatccatcctgtctttcgccccctgaaagacgccgcaaacgtaatatccatcgcagagccttgccatacggacgcggtggagttcctcgacggaaaaatcatggtgggaaagatggcccccgtatcagacgtcacttgggacaggattctggaggatgtcggaaaagagcgttttgtcagattgctgcaagaggcccacttgctcgctctcgtcaactggagcatgctcccgttcatgtccgacatctgggaaaatatcatcgcggaagtctgcccgaaactttccaaagccggcgaccgctttttcttcatcgaccttgccgacccccagaaacgggagttgtccgacattaaaaggatgttgagcatagttccgaagttttcaagttgctataaagtcatacttgggctgaacggacgcgaggctgggcagatagcgtccgcgctcggcgtctccgccgacgcttccgggccggacgccgccgcccgcgcctgcgaggaaatctcccgcgcgctcgacatctactccgtcgtggtgcatcccgtcgaattcgccgtcaccgtcgtcgacggcaaaacctaccatcaggacggcccacacacaaaacgccccgtaatcacaaccggagccggagaccatttcaacgcggctttctccctcgccctcgctctcggaaccgatccccaaacggccctcctcatgggcgtgtgctgctcaggctattacgtgatgacaggcgagactcccgacatggacaagctgttgtcgttcatgtccgactggcgggacgaccccttcggcaaaatgtgaagcgcgcctcttctgatgttgccaataatatacccgacatccgcccgtaggtggcgacccgccgggttgcccggatgtgcgataaaggaaaaaggcgacagcccaatcagcgggcaattcatgaattgcccctacagctaaaaccgcaattggcaacgtttgtcattaggctatacatgttattaaatgattccacccgctaccaagcgcgccatgcgcaaacttttttctttgcgcattatgctttttaccaaaatagttaatgggaaccttcattcaattcttcgtatatacgcgcaaacgcatttgtgacaatcagcatttattgccgccattcgcctcggatgcttttgatataataaaaaaggggcggcccgaaagccgccccttgcgtttcgcttgtgcttcttaaaatgtcagcccagcagcttcgagatcattccggctgctttcttcggattgagaagatcgcggcgggaagccattttgatcttctgctgtttctccctgtccgcgtacatttcgaacatctcttccttgtagtggaagacctgaatgtagttgacttccttgtaatcgctcgaaatatgagcgtccgggtagcgtttcttggcctcttcgacgcgctggagggcgagtttaacaatgtcctcgcgcttgccgaattcgagcgctccggtcgggcaagtggtgacgcacgccggctgcaggccgttcgtgatccggtcgaaacagagcgtgcacttaacgtacggcgctccgtctttttcctgtttcgggatgttgtagccgcaattcatcccttcgaccttagctgtccgctcattgtatatgacggcgcccgtgtcggtgatgacgacggctttgtcatccgtgccgtcggcgatcatcttgcaggccggctctatgcagtggcggcaggagtccttgaagaacgtccagatgattccgaggtctccgccttcctgttccttgaatctgaccacggtgcgggtctggtgagaaaggtcgggcgggttctggtgggttcctcggttgttcgtcttttccgcggcgtcctgattccagttcttgcaggctttctggcaaccgcggcaggcgatgcatttcgaagagtcaaaaagttttgcgtatgccattcccgatcaccccttcctttctatattcaccatgaacgccttggattcagggatcatggtgttagcgtcgcccacggtgggcgtgagcaggttcgcggtgtctccgccgttttcaggcgcgcaccagccgaagtgccatgtggttcctacctgatgaacggtctggcctttgattgtgaaaggtttgaatctcgatgtgaccatcgcgacgacgtcgatctggccgcgcgccgacttgattgtgaccatttcgccgttctttattcccttgagggcagccagctctttgctcatctcgacgaagttctgcggagccagttcgacaagctgcttgttccagcgggtcatgagtccggtctgccagtgctcgacaaccctgtacgtggagcaaacgaacggatagcgcggatcgcaggtcaaataaacgtccttgccctcgccctcgcccttttcgttgaacagcttgacggtcgggttgattctctgtccgctgaaagcgttgttctcgaccgggcattcgagcggttcgtagtgttccgggaacgggccttcggccagtccgggaccgaatatcttgcctactccttcccatgtcatgataaaaggcagtttgcctttttctttgtccgacatcgggggagccgcgttgtccgcgatgtctccgacccatttggctccgtcccacttgatgacgggcagttcggggcggcgcgggtttccgtcgaggtctaccgacgcgcggttgtatatgatgcggcggttcaacggccagcaccacgaccagttggagtaaagcccgatgcccgacgcgtcgttgttgtcccggcgcatcatcatgtttccggcttcgggataacttccgctgtacagccagttgccgcaggcggtcgagccgtcgtccttgaggccgacgaagttcgtaacctgcgtccccttttttaacacagcgccgtccgctccggccacgtcctgcgtgtaatagccgttaacctcgcgggctatcttgcgagagcttaggtgtccgttttcctcgtaatcccacgctagtccgagtatcggggccgggaatgctccgccttccgtcttgtatagctctttcaagcggtgaatgaggccgtcgataatctcggcgtccggcatcgcttctcccggaggattgacggctttgtagcgccactgcgcccaacgtccgctgttgctgatgctgccttctttttccaccgacgccgcgcagggaagcatgaacaccgcggtctttatcttgctcgggtccatccccgggcctttccagaactgtcccgtctcgttcgggaacagattcacgttcaccagccagtcgagttcgccgagagctttgcggacttttccggcgttcgcgctgctgcatgccgggttcatcccccacgcgaagaatccggagaatttgcccttgctcatctggtcgaacaggttaagccacgagtagttggctcccacatcgcccttcggcagccagccgtatccgaaatcgttttccttcgtcgctgattcgccgtagaatgccttaagcaggctgaccatgtacttcggggtgtggctccaccagttaaggctctgaggctccgccgtcgtcggcgtggtggccttcaggaagtccgccagcgtggcttgtgtgccgagtgggaacttcagatagccgggcagtatgtggaatagaagggcgaagtccgtcgagccttgcacgtttgactcgccgcgcagcgcgttcacgccgccgccggccactcccatgttgcccagcaacaactgaattatcgacatagtcctgatgttctgggttcccaccgtatgctgcgtccaacccatcgcgtacaggatggttccggacttcgcgggaccggatgtggaagtgtacgtcttatagacctttaaaagctcgtccttggtcgtgcccgtcacttccgccactttgtcgatgtcgtagcgggaataatgcttcttcagaagctgatatacgcagttcggatcctgcatcgagggatcctttattaccacgccgttggcgtctttctgatacgcccacgtcgccttgtcataattgcgtttttcagcgttgtatccggagaacagcccgtcctcgaacttgaagtccttgttgattaggaacgaagcgttcgtgtaattctggacatagaacttgtcgatcagatcgttgtccagaatatacttaatcatgccgcccaagaacggaatgtccgtcccggagcgaaggcgggcgtaaatatccgcctttgaagacgtcttggtgaaacgcgggtcgacgctgataagtttcccgcctttctccatcgccttcgtaacccatttgaatgaaatcggatggttttccgctgcgttgcttcccatcaccaacacgacatcgctgttgctgaaatcgatccagtgattggtcattgctcctcggccgaacgactctcccagagccgctacagtagccgagtgtcatatgcgggcttggtgttctatatacaccaagcccaaacctctgaggaatttttggtagatgtagcactcctcgttgtccagcgcggcgctccctacggacgcgattccttccgtgcggttcaccgtctctcctttggcgttcttctcggcaaaactcgcgtcgcggctcttctttatccgctttgcgatctcgtcgagcgcccagtcccacgacacttctttccattccttgccgtacggctcgcgatacaacggcttagtcactctgtcgttgttcaccgcgaggtgatacagcgacgcgcctttgctgcatagcgcgcctcggttgatcggagcatccgggtcgccttcggtgttgattatcttgccgtcaacagcgtgcaccaagatgctgcaactgaccgaacagtacgggcagatggtggttgttaccgtcgcgccttttgtgcgcaactctgcggcataggctcgggaactcttgaacccgaaaccgattccgctgagcgacagtccggctaccgtcgcgcccgaaactttcagaaacgttcttctggtcagcttcatgtgtgtgaactcacccctctcataggatttatttttaatcaaacaaatacacctttagcttacacagtttcttctcataaccacttcaaaatacccacgatgaaaagaggtgtcaatagaatgagaaattaatagaaatctatgtcagaaatgacatagattttcaaaataatcttttatctatttggatatttgcttatgctatatttaacatagcttcgacgtatagttcaccgagcgaacatcctaacaacgtctctccgggcgcgtccgccgatagcacgcaaccatcctctatcgtgccggggccggaaagtattctcgcctccggctccaccgccacaagcctgtctcctgccactccgtggacgattatcggctctttcgcgccgaccgggagcgtctccctcaattcgcagaactctatccttgtgatctctccggggtcggaatgaatgtgaacggcgtaatccctcgcgcctttttcgtccacaaagaaatgaacgaagttcaagtcccgctcccctgtcctgtccggcggcgcgcccccccctcctaattgtatatatataattccttctatttcttccctttgcgcgctgtgcttgtgcccgtaacaaacatactccacgcccgccttctggaacatccctatcatcctctcgacttccttttctctttcctccaacgttgtgttccttatgtacatcgggtcaagcatgcttcggtttccgtagaccgggaaatggaaaaaaacgaacctgtgctcggcgggccgcgcaagctgctcctcaagccactcccattgttcgtccggtttcggcccgtccatcctcaacgttgcgtcgttgtgtttctgcgcgttgtcgagcatcagaacctgcgtgtccccgtaattcaccgcgtaataaagattgcccatccgctccctgtacagcttggtcgacaggtagctgtcgtggttgccgattgtcgcaaacagcggagcttcgagtttcgccgtctcagtttcaaaaacgttccattgcgctggttcgtccacatccacgttgtcccccgcgtttaccacgaaaaccggtctgcgcaagttgacctgacggcgcacgcgcgcgaactgctccgtcgccccgtccgcccccagatgcgtgtcgctgaaagcgataaagttcagtcgctcgccgggcgccgggttgtatgcggtttccagaactgcgcctcccggccgcgaagcgttcgccctcagcgctacgattccatccgactcccggatctccgccgtctcgactccttttcccgaaaacgacagcctgcctgcccggacattcgccagttcgattctaaacgcgtccgtccccgccgctcccccctgaatcctgaaccccggctcgagcgatgtggcgcgcactcgggcgaaaccctctccgcgctgacgcacgaacgccccccgcgcggatatcctcagttcctcgctcgcgcgggcgccgccgaacggccatgccgccatccccgccgccacacccgctcccgctgcggccatccccttcaaaaaatcccgcctcgtcatttctttcataaagcgctcccatttttcgtcagaaaagcttccggttccgcgcgcacggcgcgacaaacaatgaacatctctttgactcgtttttcagcgaaattccatcttcagccgtcgctcgcagcttcttctattccggcgaatctgtttctcgttcgacaggctccggggaatccggtttgaaccttgctttgttgattacgaatataaaagtgtcgccctgaatgaaatagggatgaaacaagtccggattgtccgccgcccaatatgcttccaccggcgtttccactctcccgcgcgcaaactcgcgcgttaggaatagaacgtccacatcttcctttattaatacagcaagccatgcgtcgaaatcgggatatcccctgaagatgtgattgagccaaaccgattccgagggcggcttgtagccggggaacgagcggaggtctttttcatagtggtgaaaaacagcgccctgcctgccgtccacattcgcgtatatcaccctgtttttgagcctgtgtccgtatagtccgtacggcgaacagttgccggaatacgcgaccgtcaaagccgagtcgatggaattcagcgcccgccatcctgacgccagataatgagcgccgtaccaatcgtatctgaatctttccatgtggccggatttgtaagggagcgcgaaatacagagccgcggcggccatcatcgcggggacaatcgcgcgagcgggttttcgtcccgccggggcgaaaaacgccgccgcccccgcgagcgccgccatagcgaacagcgcaagcgccggagccgcgtttgagacccattccggcaacccggccccgccgaaaaacgcgtcccgcgcgaacgcgccgaaacgcgtcgcggcccctacgttgcccaacgccaacgcgcccgcgaccacccaccatcccctttcccacttccccttccacatcgcaatccctatccctatcgcggcaagcatcagacccggagccagaaacctcgcgttattctcgatgttgtaagggttcacatgccagaacaggagaaataccgccgggactagcgcgataaccaagcgaacatgcggcgcgcggcgggttttcaacgctgcggacatcagcgagaaaaacaggactcccgataccagcggaagcgcagaagccgccgaagccggcaaaaaaccggggtaacgcgcctgcgccgcaatcgcccccgctgccgccgcgaacgccaccgcgcgcgccgcagtcgccctgccgggagccgctttcagcgcccccgcaatcagcgccgcgccgaataaaaccgcagccgcgccgccgccgagcgcccgcccgaccactatcttcccgaacgcccccatgtccgacgcgggtatgtgcaggtatgaccggaacatcgccgccctctcgaatgccccctcgaatattttccatccgaatatgtccagccccatcgggtagaacgggctgcctgtcaatgaaaggttgcgcgcgtaccagaatatgcctgcggctgctgcggcggcgaaaaatgcgtccgctctggacagaacttttttccatgactcgccgcgcgcgcgcgccgccaccagcggaaccagtagcgccagcatcaccgccccgaaatacttcgagccgacagccagccccgccgctagacctgccatcagcatgtcgcctttcgcgcgcccgccgtccgaccgcgggatcaaaaacgcgactgcggccaagaaaaatgccgtaaaataaaggtctattccgaattgaagggtttgcgcaagaacaattgggactgcggaacccgccgccgccgccgtcgccgcgctcttcggcggcatccccgcccgcagccctattacgtgcgccgcaagcgccgcagtcagcagtcccgccgactccatcagcccgcacagcaggtcgtcgttcagaggcagcatcagccacagatacatcagttcgccgttccccggatagtaggtcgtcgcctgttccgggcttagcgtctgaacgaaaactatctttcccgcgtgcagccactccgccggaaataccagatggtccagaaaagcgtccgtgggggcaggcggcatggtcagcgcaaacgagcacatcatcaagaaaaggacggcggatatgattttcactgcggccatcgccgcgcccgccatcgcgtccggctccgaatgcggcgcttcgccaaaagaaagaacgtcaggggagtaaaccgcccgcgaagatttcgccttgacgcgcgccgccgcgacaacaaccgccagaatcacgatctgcgccgcgaacgcgttcgggtacttaatcgcgcccgccatagacaacaggagcagggtaaaagcgaccgtggagacaaaaacgacgcaggcggcaagcaaccgctcaggcccgcgtcgattccccgtcagcaaccccgacgccacccacgccgccgccgctgctggcagattcagcgcgaacagcctcgcgatgtcgctcagattttccattgttgaattataccaattatttcatccgaacaaacggttttttatatgacattgaacataaactgcggaattccgctatatttcgcttgctggcaaatatgcgcctctgaatctcttcatatctccctttttctttgtttattattccggcggcgctgttaattatttcgcggtttcgtgtaaaccctgaggaatttcggtaatatagtaatgagggacaaaataccggataacatgcggcaagggagttttccctcggaacggaggcggaggctatgaaaaagattgtggcggcggcgatgatagcggcggcgatgatagcggcgtcaacggtcgcgacctttgcggctgaaacatacaacttcggcgtttacatggggccggacgagcgggaccagcagcttaaaaccgttctcggcgcggtggtcaaatacgtcgccgacatcgagaaggtcgatatgcaactcaaatggtacgacgacgaaaaggccttcaccgacgacgccgcgaaaggcgttctcgatttcgcgttcacaaaaaataccgatccgttttttcttctggccactaaactcggctatgagccgatacttggcgtgtcgcttttcgacaagaaaaccgcccggatgtgcctctactcaagctcggacacgaaaatcacgggcatcgacaaaatgaaagacctgcgtctagccacctacaaggaacacgacggctactatccgctccgcaagatgttcggagacaaaattctcgatgggcttttcaaggaagtgaaattgaacagcaacggcatggcctcgctcgacatgcttgcaaaaaaagaggttgacctcgcccttgtgcacgagatgaacgtcttttccctcaagctgttcaaccccgccatgataagcaaactgaacgagcttgtttgctcggaagcgacagttcagccggggataatgaaacacaagaacgcccctaccctgctagtcaacaggctgtccagcgtgatggaaagcgcccacaagtccgaaaccctgaaaccctacagaagccttatgaaaacaacaaaaatacgctttttccccgttaccataaaagacttcgacccgctcatcaagctatacaccgacgcggcaaaaagcggctgggataaagactacaataaatggctggccgccgctaaaaaatagttcgccgatataaacgacttattatttgaaattactcatgaattgttgctgttttcgctcacgcacaaaaaaaacattttgtgcatggcacacaaacgagtgggtaaaatcaattaagaactggcataaacgcgttaaatgaaactgccgtattcatgcttgaacccggctttatttatagacccctgagaaccgggccatttttatagcggcacactgcttctcacgcacaaacgagcttgtgagcgccgcccatgtttgtttttctgtaggggcgcggtttccgcgccctatcatggcgttgttccgggcggggcaaccccgcctctactttgaataacgcgccttgcggtccgcatttcttccgctttgaacattcgctcccgaatcctaatgatggatccgggtttaaatgaaaactccaaatctgcacatggtattatttgtagcgcacataaataatcaaggaaagaagcgggattttcaattagtattccgacacagtcgccgaatttgcctttcattcccagagcggcgaaaagcgggcacaggcatcgctggggcgcgcgctgccagtccccgattttagcgtgtaaatgtttgccgggcgggtggaacatagcctgctttcgctcgcaggacataacaattccaacaagaacaatcccaccccctgccgacattccttttttactgtccgattaaatatttttcaaagacggcaatttgacgcgcaataatgtcacaggcaacgagtagaatgcatgacaaggttgtcgcattctaattgattgacaaaaagggactatgtatctgatataataaggcggctatatcacataacaggaggcaacgctatgtttaatttagtagatgaggaatggattcccgttctatggaacaacggacaagtaagcgccatcggcattaaggaagcgttcacgcgagccggaagcatacgccagatagccgcgagcaaccctatggaccgtttcgccatcatgagatttctattggccgtgctttattggtgcaaaggcaacccgacagaaggtgaaacaaaattgaaaggagattcatttcctgccgaatggtttgaaaaacttgaagcggaaaaagactgtttcaatctgctgggagaaggaaaaagattttttcaaaatcaatcagcgaataggaagaaatcaacaacggaattgctccaagaaatacctaccggcaacaattttcgacatttccgccattcgacagataatatcaacggattgtgcaaggcatgttgcgcaatggggctattgaggctccctctgttttccgtgtccggtctgcccgacctaaaagcaggcattaacgggactccgccaatctatatatttgccatcgggcctaatcttaaggaaaccctcgtttcaaattggatgcatgttgatagtataggcaatccctcatgggtcgcgccgtcgattactaataattctagctcttgcgcgcctttgcttgacggattgacgaccttatcaagaaaggtctttctgcacaatcccgatgacgaaatgtcagactgtataggatgtggcaaacgggactttttgataacaacatgtgaattccagagcgccggagaacttcgaaacgaattatgggatgatcctcatgttttgtacacagacaaagaacctcgcaaatcattaaaagctccggatcccacatcgactgggagattcagaatggatagaccgtggccggaaacggcatctcgaatatcccaatcaaacagattcattggcgcaaatacggacaatatgattctcgtgataggtttctccacagacaaagcgaaaaatatagatgtctgggaacgaacgataagaataccgtcaaaacctgcaagcacagatacggcggccacgcttatcgaattatggaaaaaagaaagttggctgatagaaaaacagcggatcggttcgagatctgataaagaaaattcatcaatggccgcaacgatacgtcctcatgttgagcatgtggtttcgtcgcgacttgacgaattgctaaccggcgaccctgccgcatgggacgacgcctcgcgcgagtaccgaccattaatgagcgcggttgccggagctttatccccggggtttacttcttcggctctcgaaagacgcagacaaatatcccgcgtcatccccgatatgcgtgaaaaaaaatccgccggaaaatcccgcgtgaagaaaggaggaaaaaaagatgagtgaaacgcagcgctttatcgacacgctgacgaaccttaaatccggcgagttaagcctgttgcgcgctcactcaggacaaaaacttgacgagtccgtccccgcatttgatttgttcacaggaatatggtggccgttaagacaacggagtcaacgcgcgccgcgccgcgaagtggcgtggctgatagcgaaactctacgcttttcgtcccgccgtttccaacgaacaaggaaagactctcgcgtctcaacttgggagttctatgccgcgcaatcagacttccgacgagtcaaaccgccttaggcaggctttcgacaacctgcttcttgcatcccttagcgacattgagccgagtttacaatgggctttagacagaatcgagtcaaaaaaactcaatctcgattgggttaagctgaccgacgatctttccatctgggaacgcgagtcaacccgcctgagatgggcggaagaatttctaaaccgaaaaggagaataacatgctaatcgaaatccacatgatacagaaccacagtccggccaacttgaacagagacgaccttggcgcgccgaaaacctgctatttcggcggagtcatccgctcgcgcatttccagccaatgcgtcaaacgaagcataaggatgagcgaggagttcaaatctctatgcggcggcgtccgcacaagacagttggcaaaactgatttcagaaagaatccaaggcaaggcagacgccaaaaagagagctgtcgcaatactcaaaaagtgcggcatcgctcctaaagacgaagaaaaaagcgatatgttggtctacaccacaaaagaagcgatctcgaaaatggcagacctgctggaaaacagttccggcaagtccgacgatgagcttgcatcggaattcggggggcttatttctgaattgaccgctgttcccgacatggccttgaatggaagaatgcttgaaaccggtgttcttaaagacacaacagtcgaggccgcgcttcaagtcgctcacgccatatcaacgcacgaagcccgtccggaagttgattattacgttgccgcagacgacattccgggagccgacgcgggcgccgggtatgttgatgaagctttgttctcgtccgcatgcttttacaaatatttctcaattgattttgaggctttagttaaaaacttgaaaggcaacaaagaactcgccgcacacaccgtaggagctttcatccgcgccgcggcgacagtcaatcccacaggaaaacaaaacagcttcgccgcgcataatcctccagacggcattttgattgaactcaaaaaatcgcccgttagttatgccaatgcattcgcaaggccggtctctatcagcggagggcgcgacatcgtttctcagagcgtcgctcaactcggacaatacatcctcgatctggacgccggctacggtaaaccggaaaaccgattctggttctctccgaacctgcggttcccgttgcagacgatagaggagaataaagaaatcgatctctcagataacaacgtcaaatcacttgacgaactgatccccgccatcgtctccgctatcggatatgactggagcaaagtaaaagaggttgttcttaattcagaggtggcatgatgggcgaaaacacgatgtttctccgtctagaagggccattgcaagcgtggggcggacatgagtccaagtttgtcgtccgcagaacctgcgaagcccccacgaagtccggcgtttccgggattatttgcgccgcgcttggcgttccgcgagcagaagcatcctcattctggttgccgaagcttcgctctttgcttatgggcgtcagaattgacagggccggaatccgctggtgggactaccacactgtgggcgcagaaatgcagatgagcattgcggaagccgagggcaagacaaagaaaggcgcgctgctcacgcgtcgagaatatctttgcgacgcttcttttttagtcgctttgcagggagattcagcagtgatcgatcagatcgaaaccgccgtaataaatccgaaatggacgctctatctgggaaggaagaactgcgttccatcgcggccattgagcgagcgccctccggaatcgcatcctgatctgatctcggcgttgtcatctgttccttggcgcagaaggaacaaggaagatgaagcgccgcagtcaatcgactgcctgattgactggacgcccacgcaagaacagccggaagcgccggatgacgcgttagtgtggcacgatgtccccatactgttcgagccgccatcccatcagcctcggtttgtgatgctgaaaaacctctcagttggaacagaaggagatgtcaggatagcggaagacgcggcgcaaagcagagttcccgatccgccacgttcccgcgcggactattcaaactccgcatacaagaacgcgcgggccgagcggctgaactccgaccacggactttgcgttttctgcaaatctcccgcgacaacagttcagcatgtgacatatcgccgcgctggcggcaatgaatctcaagaagatttgcgctctctttgccgactctgtcacgacgcagtcaccatgatagagtacggacacggaatggggcttgaccggataaaccccgaacaccctcaatggcgcgatgaaattatcaagaaacgagaagaagtagtccgataccggtctctcgaaacccgacggagacgcctgagcgcagaggaggtggaataatcgtcatgtttctttcttgccttttaatcaacaccggcgacaaccccgaccgaccgcgtccgggaagaatatggttgcgcaatctttacagagtccatcagcgcttgtgcatggcgttcccttcgtcttccgcatcgttagccgacccggattttcttttgccattcaagcctgacggcttcgcaaaaggccatgtgcatgtccctcgcaaacctgataccggttttctgttccgcgtcgaccctcttgcgggaaacggagccgcaatcatcgttcagtccgcatcaatgcccgattggcaatatgcgttccacaacgccgggtttcttctctccgccgaaccgcaagtaaaagccttcgagcctgtcttttcccttgatatgcaataccggttcaggctccttgcaaacccgactcgaaaaatctgcaccaagaccggcgaagacggcaaaagacgcaacggaaagcgtgtcccggtggcctcagataaacttgaagaatggctacattcgcgagccgaacgcgcgggtttttccgtcgttaaaaactctctgtccttaactccgtcttatgtctatgtgagcgcgcggaacgaaaaccttaaagggcaaaagcttcgttccgtccggtacgacggcgttattacaataacggacgcggatctattcaaagaggcagtgacaaacggcatcggcggcggcaaaggcttcggtttcggccttgtcagcctcgcccggatatgaccgccatgagggacttgcgtgaactgccgaaattcgaaaatagatggagccatcttttcctcgaacacggaaggctggacgaaaaggccggagccttgctatttcacgggaccgacgggtctatcgagattccgattaaccagctaggactgcttttgctaggccccggcacgaccgtcactcaatcggcaatgcgttttcttgccgacaacaacacgcttgtgtgctggacaggcgaacaaggcgtccgtctttacgcgcacagcacgggaggctctcactcctcaagacgcttgcttcgacaagcggggctttacgtcaacatggattcgcgcatcgccgtcattcgccggatgtacaacatgcgctttccggaaaaacttcccgactccgtttctctcgacaccgtaagaggaatggaagggcacagagtcagggaggcataccgcaagctcgcggaagagaacggcgtgatgtggcgcggcagaatatacaatccgcagaactgggatcaggccgacccgctcaaccgggcgctctcatccgctttcgcctgcctttacggcttgtgccacgctgcaatactttcggcgggatattctcctgccatcggattcattcataccggcaagatgctttccttcgtctatgacgtcgccgacctgtacaagatggaaatagcagttccgctcgcgtttcaaacttgctctgaaagcgatgtcgatgtcgagcgcaatgtaagattggcttgtcgggacgtttttcataaaacaaagctgatgaaacgcgtcttgccggatatcgcggaggtattagatgctggtgatgatattggagaaatccccggcgagcttgaggggagacttgtcacgctggatgatagagccgcgaccgggactctaccttggcaatccgagcgcgaggattagagatattctgtggaacaaagccgtcaagaaaatacgcgacggcggcgtcactcagatatggagcgacacccgctctccgcaaggatatctttaccgctcctgtgggaaaccggcccggccaatgatcgatgtcgatggacttgcccttgttctttctccttacaaaactgaaaggactgacgagactttgatcaatcaaaataataaggagtcttcacaagatgattgatttgacaatactactaaaagtgttttaaaaaaaccggcatacaatatgctggtgtcttccccacgcgtgtgggggtgaaccgccgactgagaacgacggcgaccgaggcgcgccgtcttccccacgcgtgtgggggtgaaccgggggcgatatgaaatccactaaacaggccacagtcttccccacgcgtgtgggggtgaaccgtttgtcaactggaaccagatgtacagctataagtcttccccacgcgtgtgggggtgaaccgtcttcatgctttgatcctttcggtatgtttgtgtcttccccacgcgtgtgggggtgaaccgatactcgaatacccgaatcctgtatctgcgccggtcttccccacgcgtgtgggggtgaaccgtgtttcccatgttgtctataaaattgagagccgtcttccccacgcgtgtgggggtgaaccgggggtgaaatgatgagcgttttttcgcagaaagtcttccccacgcgtgtgggggtgaaccgacgaagctatgcagttgcctaaaatcctgaacgtcttccccacgcgtgtgggggtgaaccggtaaatgccccacgtgcggcgaaccgatgtacgtcttccccacgcgtgtgggggtgaaccgtaaactctaatccgtcgccgctatctgtggcagtcttccccacgcgtgtgggggtgaaccgccatcgttgtcttccaccaggccgcttacgtagtcttccccacgcgtgtgggggtgaaccgcgggtggcgacgcttacggcttcttctttagcgtcttccccacgcgtgtgggggtgaaccgcagcctttgacagatggaatgcccgccgttgggtcttccccacgcgtgtgggggtgaaccgagaagcccatgacacaaacccaactattgatagtcttccccacgcgtgtgggggtgaaccgatggaagaaacaacatctcaaaaacttgcaaagtcttccccacgcgtgtgggggtgaaccgcgggggtcggctgacggggtcggggatggcagtcttccccacgcgtgtgggggtgaaccgcggcgagcagtttgagttgcgaccgccgacgcgtcttccccacgcgtgtgggggtgaaccggagggcgattgaaatggcagaaagcaccgcaggtcttccccacgcgtgtgggggtgaaccgcccggaagctaacaaaggaaatcaacaaacaagtcttccccacgcgtgtgggggtgaaccgccgttgaagataaattgttcccatatgtctgcgtcttccccacgcgtgtgggggtgaaccgtggatcagcacttgattgaccgtgagcggatcgtcttccccacgcgtgtgggggtgaaccgaatcctagagatcatgccgtcgccgccaatatgtcttccccacgcgtgtgggggtgaaccggcttgagcgtggtcgagggcgcgattgccgctgtcttccccacgcgtgtgggggtgaaccggctaatagaattaatagaattaacgtccggaatttcggcgtccggaacaaaattgccgttattctgttttattattgattgtgaaacaaatccatcacggcgaggtttgagatattgtgaacgattccaaagacctgtttgaaaaagttaaacatctattgctcggccagtactttgctgttctttcatcggtacagagggacggcagtccgtattcaaacataatcggttttgcggctacggacgatctcaaacatcttgtttttgcgacgccccgaaacacgaggaaattcgacaatctgctcggagagccgcgcgtttcgcttctggttgacaacaggagcaacagcaaaggcgacgttcatgacgccgcagccgtaaccattctcggagcggtcagggaaatcgaccgcgtcaatgatagcatttactttgagctatacgcggaaaggcatcctcatttagtggatttcttaagggcggacgataccgccgtcatagcggtgagcgttaatgagtactgctatgttagcaagttccagagcgttatgacgttgagcatgaaataaggagacaggccgcaatgaaaatatggaagtttatgaaaagaatcgggacgaccgcggcgacgctggcggcgcttgactccgtctggctgggcgtcattatgagcgactattataaagaacatctcggagaactggccagaagaaacgacgccgggctgacccccgactggaccgccgtgatattggtttacgttgcgctgacggcaggcctgaacatattcgcggtggatacggagtccggcagcgggcgcataaagaattctctcgtcaggggcgcgttattcggattaatcagttatggcatttacgaccttacgaacatggccacgctcaaggggtggtcttgggaaatgacggtggcggacatgctttgggggacattcctgtgttccgtggcaagcgccgcgacggccgccgccgccgcaaagtgagcgtcaaatgaaactgaaccaaatcgttatcatcggagtcgttctcctgttgtcgttcgccggggggcagttcacgtcgtccggcatggactggtaccggactatacaactgccgacatggacaccgccgggttccgtcataggcatagtgtggacgacgatatacatactgacggcggtatcggcgattatagcttggagagttttcgctggggattcccgattctatcttgtggccggactgttcatgatgaacgcggcgttcaacctcgcatggagctacattttttttgcccggcgcatgataggcccggcggttatagattcgatggcgattgaaatcacgctgcttgcgctcattccggttctgtggaagaaatcgcgcgcggcgtcggttctactcctgccatacgcgctgtgggtcgggttcgcgacatatctcaattactgcatctacgcgttgaacaagacgtgaaacaggagacgcccgcaagatgaaaacgatgtttgcgcggataacttgtctgagcctgattatcgccgcttcctccgttatttcggttgcgctcgcttcggattcaggatatgtcgcaacgggcgcaaaggcgaagaatttcaaactgaacgaccagcacatgcagttggtggaactggacaagctgcgcggatcgacggttgtcataatctacaccggcagaaacggattcgacgacgcggctgaaatcatcaagaaactcgacaagaaacatagcgggcgggaagacgggaaaaaagccggcaaggatatccgcatagtcggcgcggcgaacttaaagggcgttcccgctttcgtgaagaagatggtgaaaaaccgcatgaaagagccgcgttatccttcgttcctcatggactggaaaggcgagatagcggcaacctacggttatgatgaaaaagggattgccgcgttcgtagtggatggaaaaggcatagtgcggttttcaggcaatatcaaaaacgccgacgatgacatctctaaagtatccgcagctatcgactcgatatagaatccacccctgagttcatagtagaaacaacggcggagcggcgaaaagcaggcacaggcatcgctgaggcgcgcgctgccagtcccctttttcgctcagagttcacagtagaaacatcgaatgtttattgaacacaaacagacattacgcaaacgataatcaatccccccgccggcattcctctttttgtgccttcattctttatcttttgtttcttaattcattctttcttgccgtcattccttttctcttgtgccgtcattcccgcgaaagcgggaatccattttcacccgcccggatgctatttcgcctatcagcgacattgtaaactgtcaaaagcctcggccttaccatagatgctcccgtttttaaaattgctaatttcaaacctgaccacttcttcttcgcttcttctcgcatttgctatttgtgttgagtcaggcagtcaacagctttgggattgtttgttctgcgcaatactttgattatgtattcctgtatttcttggttgtctgcttcgtcaagaagtttgcacaagagcataattgcagcgtcttttccatattcgccaaggtttcgtatacaagagttctgaaaatcgctgtggtctctgtgaatagattcattgctgggggggttcggcatttttcctctggacaaatctattctttctctgtcacgagtaatatcgttaaagtaactctgtttttcttctccactcgcgatcctttccatcacaaacaatgctttgtcctcataaccccatcttagaagacacccggcagctacgcctctaactctaatgtcattgtcatttatggcgtttgatatcacagcttgagatttgacatccaacctacataattcattggtagcattcattcgcaattctggacttatgtcagatttaattatgtcttcaagcaaggggacgatacgtgggtctcgagaatttgctatgtctactaaaacaagtcccttcgcaaactcggaagtaagatgatttttgtattgatatatttttagcggtagttcacagcaaaacgttcttctatcgtattcatatatcaaccgctgatgctttttttgctcttcttcatccatatcatcgaagtctttccggggatcaatatatgatggtttccgcgaagaccaaacagggcaccactcgtcagctctgaaagaatcagatggattatccagaaacttatttaaaacttcctctcccatctttatctcttcatccggacacgctttcaaacccgtgaaatcatctgcggatgcgctgacaaaagcaatcaatgtccacaccaagcagcacagtatcatcagcaaaaccgcatatggtggagtcaggcggagcctgtttacagaattagagttgatctggttggctgatcttgattttgtataagcacggctgttgtagggatagttgttcggtcgcggatgtgtggtctgtcgcagcttcatggcggttatgttgccattatgaacgaaggagaacgatttggcaacggggggtgggaggttgtgtgttgtggagggcggatggggtggcttaaggagtgggatgctaggaataaattcccggaaaggcaaagcggcaatgaattgccgcactccaaagttccacattaattttggctgatccttaggcataggcagaaacgagtttggggggcgcgcccggagggacaagagcgaagcaggtgtgggcgctaaagctcaaggatgtcggggcgggacaggcgggcgccttggaaatcaacttcgagttcgggccattcgcctgtgcgggtgatgaattcggcgcggtcggcaaacgcgattatggtgtcttctgatttcgtgcctgtaatggaggggttccatgcgaaagcgcaattgggtttgacctcgccgggggtgtcggggctggcgcagaagtatcttgacttgtagccgcacgggccgccctgatggtgaaggagccattcgtggtcgaagccttcgctggagtaaacggcggtggcgtcgcggaaaacggaggaaatcttcgcgccgggtcgggtgagcaagttgaaagccgcatcgacgcggcagcaggcggcgtgtctgcggcggaggtcgtccccggcggggccgaagctgaccatccgagtggcggaagccacaagcccgccccttctggcgcagaggacaagcattgcggctcgctcaaggggctgccgcgtcggcagaggatgcctgtatgccgggagcctgcctccggaagctacgaggacgacgatcggctgcgcgtcccgcgtccagcactcggaggcgagcgcggcggcggcggcgttctcggtcatgcccggacgcaaagccctcgcggcggactcgagcgcggccccggcgtccgctccgagcgccctgaacctgtccatctcgctttccgtcaactccatcatcaggtcggagaaatcctcgcccgccgggacgaagccggaggccggcatgtccgccgccgccacgcccgcccccgcgcacatccgcgctatcttcgcgttcctgtcgtcggcccatggaatctcgacaagctccacgtccagcccgacgagttcctcgtctctgattcttgcggactcgattcggttggtcacgaccgcgcatcggtctggaagcagaacaaaggaggcgacgcccgcttcggcggccatgttcacgtggcaactggctccgcaagcggcccacgcaaagttgtccgaccgcgatagcgccagcgcgccccagccccgctctttcattctctcccgcatcctgtctatctttatgccgaattcttccgctctggtcattgttccggccctcaggttattgtttgtcgcgacgccgccgcgattcggatattatatcagttcttaatcggttttgccgattgagagcgcccgcaacggagttgtggacgccacccgtgatgacagggttgcggatagcgagcgcgctgatagctaattttatttaatcgctgatataatgattcgaggcggttgcggtggggacgccgcgaaacttgcgcggattcgcgtattgaaccggagaatgcggggcgcgaacgccgaggagcgaagtatgttaataggaattatatccgacactcacgacaaccttgaccggttaagagcggcgatatcgacgctgaaatcccgcggcgccgcgcggcttatccactgcggcgacatcgtttccccgttcgttgtgaaagctatcgcggaagccgggttcgaggagtgtttcggagtgttcggaaacaacgacggagaattgatttatctttccgaaacatttaagaagatagggcggatagagaagccgccggctttcatagagatgggcggagcgcgttttgccgtgcttcacgagcctatgccggacgacgcgatggcggcgctgccggtggacgccgtgctgttcgggcacacgcatcagcctgttctcaaggacggcaaacccgtgatagtgaatcccggagagtgttgcggatggctgacaggcaaatcgactatcgccgtttttgacacggcggggatgaaggcagagctaatcgagctgtaggcgcgaaagccgcgaggaggccgcaagccttcggaggaaacagatgaaagttaaaatggcgataatagcggcggttctggcggcggcggtctgcgctccggcgtcggcggttcttccggacgcgcgcgggccaaacgcctctgtagcaggcgaaaactccgcgacgatgaaagaaattttcaggataaaggtggagaacgcggcgggcggagcggtggaagtgagcgaagacggaggcgcttcgtggacggccgccggaaaagtcctgctggccgccgggacgataaatccgcgagcgtacaccgccagcggctgggcgtcttcgggggctgtcgctgcgaccgccgtaaacgccattcacataaaagtgcggcagaacgaagacagaggcgcggtgttcagcatcctgcccaaagatttcttctctccgccggcggattataaatctttctattcccggaacagttcaataataacgaatatcccggctggagggagcattttcggaggagccgaatcgccgttcataggctcgcgggttctcgcggcccgcgccggttccgctcactccccaatcgccgaggattatacgccgtcagaaggcgattccctgctgataatcgtcgaacagccggagaaatatccatcggaaatcgtcttcgaaaacaggttcggagggttcatccttataaagtatcccggagaggaaccgaaactcatcgggcaggtgttgaaaccggtggcgggggttggaaggttcgaaggctcgctgtacacggacgtcgggagaatcagggcgaaccacacgggagtcatctgcgtctcgacgtcgccggtgggagagataggcggttttcagataatccctgaaaaccacgcgatgagcgcggagatggagaacgcgaggctgctgacgcagtggatggtggtcgggccgccgggggcggcggacccgtcgctcgaaggggtggctccgctgttcaggcatttcatcaggccggtacatttcaaaagcgggccgcagggaaaaacgcttgaacaggctttgggggcgttcatagttcaggcgcggatcggcggcggggagtggacgcggatgccgtcggtgtccgggcgggacgacaaagctctgaaagacgtcacgcacatacgcatgctgttcccggtcgaatggaaacattagccgggctatcgcctatgcggggcggccgggctttgcgggttgcgggcgcggggtatacaccggggcgcaaatgcgtataattgagactaggcaaggaaagcgggacgattaaggatgtcggaattaagacgcgaccccgtgttgggtcgatgggtgataatatcctccgagcgcggcgacaggccgagcgatttcatcgcagcgaaacctcttccgaaaacgggcttctgcccgttctgtccggggaacgaagacaagacgccgcctgagatagacgcggtgcgggactcgtgcacggagccgaacaagcccggctggcgcgtgcgcgtggtgtcgaacaagtatcccgcgctctcaatcgagggcgacctcaacaagcgggcgcgcggcatctacgacatcatgaacggcatcggcgcgcacgaggtcttcatcgagacgcccgaccacgacaaaaccatatccaccctagaaccgcaaaacatggaacagctaatgtggatgtacagggaaaggatgatagacctcgagaacgacgaacggttcaaatacatactgatattccggaacgcgggtcagtccgccggggcgtcgctggctcatcctcactcccagctcatcgccacgcctaccgtccccaagagaataaccgaggagcttaacggcgctcaggaatacttcgacttcaaagaccgctgcgtcttctgcgacatgatagacgaagagagggactaccagagaagggtcatcagcgagaacgaccgatttattagtttcgcgccgttcgcgtcccggttcccgttcgagatgtggcttgtgccgaaacatcacgaccccaatttcgcggacttggaagactccgacatcgcgtctctggcgcagtgttttcagaagtcgctcaaatatctggacaaggcgctggacttcccgccgtacaactacatcatccacaccatccccgtgaacaccagccgacagtacacgtaccactggcacatagagataatcccgcgcctgaccaacatagcgggattcgagtggggcaccgggttctacatcaatccggttccgcccgaacaggcggtggagattctgcgctcggcgaacggagacacgcaatgagcgggggcgaactgagccacatagacgaaaaaggccgagcgtcgatggtggacgtgtcggaaaaggaacgtaccgcgcggcgcgcaaccgtccggggcgaagtgcggctcaggcccgacgtgatagacaaaatactgtccggcggaatctccaagggagacgtgttccaagtcgcccgcgtcgccgccgtgtgcgccgcgaaaaaaacatccgaccttatccccctgtgccatcctctcagcctgacgaaagtttccgtcgagttcagcgccgacagagacgctggaataatcgttatcgacgcggaagccaaagcgatggacagaacgggggtggagatggaagcgctaaccgccgcgaccgtggccgccctcactatctacgacatgtgcaaagccgtccagaaagacatctccatcggccctttccgccttatggaaaaagaaggcggcaagagcggcccttataaaaacgaagcttgaacccgaacttgaagaaaaatatttgccggaagaaatcagattaaaaaactgtcgatggttgaccgcgtccggaggcgttcagaatgaaggcaaaaacaatcgcgttggctatagttgcggcggcgtttatggcgggcagtccccgcgcgctcgcggacggaggctccccctcccccgcttcgctgagggttctcaccgcaaacgtcggcaacgcggacatactgaactgcggcccgaaatatttttacaaactgtgtctcgtggaatgggagaagaaggtcgcggaagggatagccaagctgtcgcccgacatagtgtcgctgcaggaagttctggacgttcagtggtgcgaggcggcggccgtggagaaaaacaagaagaatgtgtgcttccggtttgaggacaggaaagagaggcatcaggttcgcaggctgttgggagatgattatacgatagtgtgcgacgggcgcgccaactacgagtgcataggagtgaaaaaaagcgtcgggacgattgaaggttgcgggcgcggagaactgtgccgcgctccgggctggccgctgacaatcgaaacgccggaaggatgctcgacaaagacggtcgtgttcggggcggacgcggagattaatgggaaacggctgaggatagtcaacgggcatccgtcggcggcggacgccggatgccgcgccgaagagttgagaaggttgttcgagggatacgaagggttcccggcgcttgcggccacggacagtcctgcgattatcatgggcgacatgaatatggacccgtttcaatgggacgccgcaaaagacgacgtggcggtttggctgaagcatgttggggatggcaagaaatattactatctgagcggtcctgcggaaaacgacccgccgttcaggacatgctccgggttcacgctggaccacgtgataacgaacgcggcgcgcggctcttgcgtcacgctggggcagtcgcccgggacggaacggctggacgggcatccgaagggggctccgattcaggaagcgcccgaccatttcgctattctttgcgaaatatccctgcctgacggggattgacggcgcggcggcaatcggtttggagcgggatagacgccgttctagggccgatttaaataaagttgcaaaaatatatctcaataacaataataatgcctgttggcggagtgtcgcggaacgaactgcgacgcgcccgtcaaaattcatcaggggagtgccgcgatggataaggaaaaagaaaaagaattagtaaagtcgtatctttaccttaacgccgtccttcctcagcttgaggagataatcgcgtatgacgcggaggcgcgcgagctgacgaaaggctggaactgcacgatccagatgcacgtgcccggcggggcgggagtcaggttcgtcttcaaagacggcaaatgcgaggcgaaactgggcgctgtgagcatgcccacaatctcgctgaggattccgacgccggaagccgccaacaaaatgatagagaacaccggcacggtcattcccatgatatggggcttctggaacatcgggaaactcggaaagttcatgaagctgacgaaactcatggagaagtatctgagaccgtcggaagaagatctcaaaaacaaggacttcttcgagttccatacgcgcgtgaaactcatgatggccgtctatggcatgaaggccgtcggagagcacgacacgtatgtaaaaggaatagtgtcgaaagtgccgaacgggccgatggagataaaggtgctgccggacgggccggtggcgcatatcgtgctggacaacggaaagttcgctgtggccaaagggccggcggcgaacccgatggtcgtcatggaaattaaagacatcaagctggcgtacgatatgctgaacgccaatgtagagttcatggaagagctgggcctgtgccgcataaggctgcgcgggcacgtcggaatggctgaaagcctcgcggtcgttatggagcgcatcggcctgtatatcagttgacgccggacgactatacccaactggagggcttgaaaatggaaacttacaaatttgataaatcatacgagtggttcgagcgggcatgcaaagtcattccgggcggagtgatagggcacaaacaccccgcgttcaccgtccccggctcgtatccgtatttcgcgactcgcggcgagggaagccactactgggacccggacggaaacgagtacatcgactggatgtgcggtttcgggccgatggtgctgggatacaacaacccggtggtggacgcggcggcgcaggaacaggcaaaactgggcgacggcatgagccatccggggccgatcagcatcgagtacgccgagatgatggttaaactcaccaagggcatggactggtgcgtgtacggaaagaacggcgcggacatcaccacatggtgcatgaggctggcgcgcgaatacacggggagaaagaaaatcctgatcgcgcgcggcgcgtatcacggcgctcaggcatggtccaccccaagctacggcggcatcatcgacgaggatcgcacgcacgttcacttcttcgaatggaacaacctagactccttcatggaactgatcaacacatacaaagggcaggtcgcgggcgtgatgatgacgccgtaccaccactgcatatacgcggaccagcagatgcccgctcccggctggtgggaagccatcggcaaagtctgcaaacaggaagaattgattctgatatcggacgacgtgcgcgccgggttcaggctcgacatggctggcagccacgcctacttcggatacgagccggatctggtctgctactccaaagccatagccaacacctacccgatcctccgccggtctgggaacgaacaaactgaaagagaccgccgaacacgttctgttcacgggaacgttcttcagcagcatggttccgatggcggcgtccatcgccaccgtgaaagagatgcagaggctggacggagtaaactacatgatgaaaatcggcaaggcgctctgcgacggccttgtcagcgtaggcaaatcccacgggtttgagattatcatgtccggaccgtacgacataccgttcatgcggttcgcgcgcgagaagaacttcatgctcaaacagctcttcagcggcgaggccgccatccggggcgtcatcttccacccgcaccacaactggttcacctcctgcgcgcacacggaagaagacatcaagaaatcgctcgaagtggccgacatcgctttcaagaaagtcaaagacaaatacggaagcgactgaagcgcgacaaacggatagacgcagtaaatccgcctttaaaagcgcctccggcggccaaagagaaacttttgaaaaagtttctctttggaatctcttcaaaacttttcacatgagcgcggcggagcgatggcgcgaacgcgcccgctccgccgcgcgcatagaaatgttttgagggaaaacttttttaaaagttttcccttaaccgcattaaagcgcctccggcggttcaaggaaactttgaaaagtttccttgaaaatccttcaaacttttccttgcgcgtcggtacgggacgctgacgcgtcccgtaccgacgctcctgtggaaatgtttaagaagaagattcctcatgaaacccctttctcaatatcttttcgcatgatacgcgccgatgggaagagcgaagccttcccatcggcgctagcgcgaaaagttttgaaagggtttaagggaatactttttcaacgttccgtcattagtaatacgtatcatatacgaagaactaaatgaaagctcccatttactatttggtaaaaagcatcatgcgcaaaagaaatagttttgcgcatggcacaactcttagcgagtatattctgctataatattagaagtaaaacacgaaaagcttaactctgtttttcacattagaacaactgcgacaggagcgcggctgaaactttgtaagctcgccataatacgcttgttcatgtgttaacaacgattcgcgcgcgcaacgtttaatgatttggagcaaggcaatgaaagaatcaggaatactgcttgggttttatgtggaccgaaaagaagctaatgtggcgtttaggatgttgcgacgccgtcattttcgcagaaccgcgataatttcaaaaaccgcctccggcgtggttcgcaaaaacgccgcggaggatagatattggacatgcgtaggagcggtcgcaggcgtcgcgattggaataataattgcgcatctgtcttttggaacattcgaggcgatagtggcatggcgatgcgtagtcggactattgcttgcggctgccggcggggcgattgtcgcaaggctggcggtttatgtctttcagtcgagcgaggatcgcgattttacgaagaagcgatcccgatggcttgtgaatgaagaaacggccgtcatcgtgaaagctccgttggagtcgctggatcaagctttggcgcaaatgcgcgtcgccggagagacgcaaccctcgatttttgtttttcaccatgaccgggtcacagaggcggaatctggatctgacaagaatgaacacatgacagcctcgcagttggctgtgcacgcgagactgctagccggatatcatcgcgttcagtcatatatgggcgtcaagccccatcttcttgagcttgtggatgtttgtgttaaggagatagacctttgccgccgtgaactcgccggggcgtcgcgtctcgaacagcgcgtttccccttcagcggaatggattcttgacaactatcatctaatcaaagccaattacgacgatgtgcgacgcaacctgcccggaaatttttatcgagaactgcctatgctggccgctgagcaggttcagaacatgccgaggatttactgcatagcgtcggaccttgtatcgcatactgacggccaactggatcgtcacaccatattgaaccatcttaacgaatatcaagcggtcagtcctttgaagatgggcgagttgtgggcgatgccgcttatgcttcgcatcgcgcttatctcattcataagaaacctaaccaatcagatgacagtgtggctgagagagcgcgagaacgccgacttctgggccaatcgacttctggtcgccgcgcggctcgcccccgacagtcttttttttcttctgtccgaactggagcgagaacagcctgagcctagcgaccacttcgcgtttcacctcaccggacatctcttcggggagagcgaggttctcgcgcacgttaagagttggtttgagcgcaagagcggcggcgtcttggccgacagcgcgattcgcgagcaggcgcgacaggccgcgcataacgcttccatcggcagcgcgatagccagtttgcgccaactgtctcttattgattggcgggatgttttcgaagacttgtgcgtggttgagaaaaaactttgcgaggacccgtctggggtgtactgcagcatggattttgccacaaaggacagatatcgccatgcggtcgaggaactggctcgcggcggcggcgtttccgagcaagaggcggcggaggcggcggttctgatggccgacgcggaagacaagccgcttgatccccgaaaaaaccatgtcggatactatctgatcgacgagggccgtccgcgtctggcctcccaactggcaagccgggaaaccctgcggcggcgaattcttcattgggtctatcgcaaccacacggtcatatatatttcatccattctgcttccgacggtcgcggcggtcgccgccgttgcggcggtcagctctttcgcgggagggagcgcggcgctaaccgcgcttgcgtcggctctctcatctctgcctgccagccagatagccgttcaggcgatcaactaccttgtgacgcgttttttgccgcctcgccttctgccgaagatgtcgttcgaaaaggagggcatccccgacgaattccgcacgcttgtcgttgtgcctatgatgctctcaaacatcggcacggcgcgcagggagatcgaaaagctagagatacgctatctagccaatccggaaccaaatctcctgttcagcctgttcagcgacttcaccggctccgacaccgagcgcgacagcggagacgccgaactccttgcggccgccgtcgatggaatcaacgcgttgaacgaacgccacggcgcggggcgttttcttttgtttcaccgcgaacgcgtgtggacggagtcggagcagtcctttatcggatgggaacgcaagcggggaaagcttgagattctaaacaggttgctgaacggcgaagcgcttcccgacggacagcagatcgtccgcgcgggcgaccctgacttgctgaagaacgcgcgcttcgtcatcacgctcgacagcgacactcaactgctaagagacacggcgcgacgaatggtggagacaatcgcccacccgttgaaccgcccgccgttcaaccccgcggacgccgtcggctccagcccgtacactatcattcagcctcgcgtcagctcaagtcttcccagcgcgacggcgaccgccttcagccgcttgttcacagaccccatcggaaccgacccgtacacgaaagcggtttctgacgtttaccaagacctctccggcgaagggtcgtatatcggcaagggcatctacgatccgcgagcgtttcaccatgtcttgaagaaccgttttccgttgcagaggattctcagccacgacctgatagaaggggcgcatcttcgcgtcggctttgtcagcgatatagaactgctcgacgaatttcccggcgactatttttcctatgtcaaaagagagcatcgctggactagaggcgattggcagattgcggactggtgcatgccgaaagcgccctcccctgacggcaaacgcgttgcaaatccgctcagcgctctgaatcgatggaagatttttgacaaccttcgccgaagcgttgcgccggcggcgtccgtgttgtttctcgcttcgtcatggctgatatcttcgggaatgggcgctgcggcaagcttaatagttgggttatcggccttcttcccggtgttttcggagcttgtcacgcgagcgaccggcaagcgcggggcggaccccctgtcatggcgacaactagcgcacaacgcgaaacgttgctgcgcggaactgcttttcctgccgcacagggcagctatgtccatagacgcgataattcgcgtgttctaccgtcgtttcgtaagccatcgcggactgcttgaatgggcgaccgcgcaggcggttcaacagaaagcgtccgaacggcttcgcccgcttctggctcaactgtgcgccgtcagcctgttctctgttgtcttaggaatcgcgatatttctgtcgcgcccggataatctctcgatctctttgccttttcttttgctgtgggcggcttgtcctatagcagggatgcgtctgagcgcgccgcgccgcatcgcgcgcgcgcgccctatcgcccgcgaagatgaaatcatgctcagagtcacagctcggcgctcgtggcgctatttcgaagacttcgtaggcccggaaacatcttggttgcctcctgacaactttcaggtttacgccggaaacaatcttgccatgcgcacaagccccaccaacatcgggttgggcctgctcggcaatctgggcgctctcgatttcggctacctgacctgcgacgaggcgttcgagcggacggcgaagtgcatgaaaaccatagcccgactcgaaaaatacaacggacaccttctcaactggcacgacatcaagacgctcgaccctctcgaacccagatatgtgtcgactgttgacagcggaaatctgcttggcagcctgtggacgctcagcgcgggctttcaggaaatcatcgacgaacccgtcatcgggccgcaggcgttccacggccttctcgacacgctccgcgcgctgcgcgaggcgcttgagaaaagcgacagagcgagagttcataacgaggcgttgaaatttctcgaacaacaactggccgagcctccgaaacgactgtgcgaactcgcgactcggcttttatccttgacaggcgctgtcgcagagttgcgccgggccgtgtgcgaaaacgccgcgccacgcgatgaggccgcgcactgggcgaaccggactgaaacaatgcttgcgtcatggcgcacgctgatagaccgctatctcccgtggatggaagcgattgcggaagagacgaaaaccgccggcgacgagacaagaaacggcgcgattgcggactgtcttgaggctctggaaaaagcgccctccatgcgacagctctccgagggaaattttttactgtcgaagacggcggcaaatgatgaaaacaatttgaacgaaccgcgacgattggaatgcggacagcgagtcgaagacgcttttgcccgcgccaaatggatggccgccgaaatgctcgaccgggtcggcagcctgttgaactccgtcaacgagttgtcagaaagcatgaacatgcgcttcctgtacgataacgagcgacggctcttctctataggatttaatgtgagcgagcaacggcttgactcgtcgcgctacgatttattggcgagcgaggcgcggataggaagccttgtggcgatcgcgcgcggagatgtgccgggcaagcactggctggcaatggcccgtccgtacggctccgcgggggggccgccagttttgctaagttggacaggcacgatgtttgaatacctgatgcctcttctcttccagaagtcttttgaaaattcgctcttggaccacgcatgtcgggaagcggtgcgcctgcaaatcgcttatgcccgccggagaggcgctccgtggggcgtttcggaatcggcgcacagcgccgtggacgcgaatagaacatatcagtatcaggcgttcggcattccggcgctgggactgaagcgcaacttgggagaaaattttgtagtggccccttacgcatccatgctcgcgctggccgtctcgcctcttgaagccatccgcaacctcaagcgtcttgcgcgcatgggaatgtcaggcgactacgggttctatgagtctattgatttcacccgcgaacgaagccgcgaaggcgagcgcggcgtaattgtcgaagtttatatggcgcaccatcaagcgatgagttttctggctatcgacaacctcgtcaacaacagcgcgattcgacggaggtttcaccgcgacccgagagtgcgggcgagcgagccgcttttctatgagcgctctccggcggctccgcctatctaccaaggctcagaccgggagcagacttctttccatgccgcgccggacgaaatcgctccgtcaacaagcgttttcaacacgcctcattccccacaccctaaaacgcagatgctttcgaatggcaactactctctaatggtcacaagcgccggaggcggctatagccgatggcgagacttcgacatcactcgctggcgggccgacacaactagcgacaattggggtttcttctgctatatccgcgaccttaagagcaagcgggtttggagttcagctttccatccggcgggcggcgacattgagaactattcagttagcttcaagcttgatcaggcggagattcgccgctcggacgatggaattgaaacggaaactctcataatcgcggcgcctgaagacgacgtggaaattcgccgcataacactcattaacaggtcaggccgcaagagagagcttgaggcgaccacctacattgagcttgccctcgctccgcacgactctgacaggcagcacccggcgttcagcaagcttttcgcgcagactgaaacggagcctcggttcggcgctctcatagccacgcgccgcgtaaaaaatcccgacgagccgaggatatgggccgcgcatttgatttgtatgccggagcaggacgagcccgccgacgagctggagttcgaaatggatcgcaatcgcttcataggtcgcggtcgctccttgtcggaccctgcggctctcggcaataaattgtccagcgtcgcggactcgtccatggacccgattttcagcttgcggcgaaagataacgctcgaaccgggagcgcgccgcgatttctccctcattctctgcgccgctgaaactcgcgaacaggtcgttttgctcgctgaaaaatacttcgaccccaattcggcgtcccgcgaactagacatctcatggagccattcccagcttgagcttcgccacctgcgcattaacccagacgacgcgcgtcgattccagaaactcgccggctcgatgatatatcccaactcccggctccgtccatggagcgacctgctgaaacagaacaaacttgggcagtctcgcctatggccttatggaatatccggcgaccttccaatcgccgttgtagttattaaacaggacgcggacatcgacttggcgcgccaagcgctgcaggcccacagctattggcggctgcgcggcctcaaggcggacctccttatcataaacgaggaatccgcgggatatgaacagcctctgaacgaacaactgaagcggcttgtcttcagccattcgatgaacacgggcgtggacgtgcggggcggcgttttcctaaggacagcaagtcagattcccccggaagacatcaaccttatgttggcggcgtctcatgtgtcgctcgtcgccgcgcgcgggcctctggcccaacaactcagcattcccgccgagaccctcagaacgctccccccgctcgccgttaaagccatcaaggaagagccctccgcgcaactcccgttcatcgaactgccgtacttcaacggactgggcggcttcacttcagacggcagggaatacgccatcttcctcggccccgaacaacagacgcccgccccatgggtgaacgtaatcgccaacccctctttcggaactcttgtcagcgagtccggctcaggcttcacatggcgcggaaacagccagcagaacaggcttaccggatggtctaacgacccggtttgcgaccctccttcggaagtcgtttacattcgagacgaagacacgggcgcagtctggacgccgactcctctgccgattcgcgaacgcgacgcttaccgctcaagacacggcgcgggctacagcgtctttgagcacaacagccacgcgatagaacaggagcttacgatgtttgtgccggtcaacgacgacggcggggaccccgtctgcgcgcgcaggcttaagctccgcaacgactcgtcccgcgcaaggcggctgtccgtgactttctacgtggaatggacgttgggcgagcatcgagagaatatgcaggcgcatgtcgtcgccgagtatgaccgcggctcaaaaatgatattggcgcgcaatcgctaccgcgcggattacagcgaaggagtcgccttcgccgcgacaatccctgcggcgagcgcgcacacaggcgaccgcgcggaattcataggacggaacggaagcctgtccgcgcccgcggcgctcaagcgagccggattgtccggaagagctggcgccggatttgatccttgcgccgcgcttcaggtgaaaattgagcttgcgcccggcgaaagaggcgaaatcatctgtctgctcggcgaagccgacaacgcgaccgaggcggccgctctggttaataaatatcgcgacggcggctccgtcgcgaaagcgcttgagcaaaccgccgcgtggtgggacaaaacgcttggcgccgtcagcgtcaacacgccatctcattcggtaaacctgttgctcaaccgctggctcctctatcaaaccataagctgccggctgtggggcagatcgggtttctatcagtcgggaggagccttcggattcagagatcagcttcaggatgtcatgtccctgctgtacgccgctcccaagcttgctagggaacatctgcttcgcgccgcaggccggcagttcagagagggagacgttcaacactggtggcacccgcagagcggggcgggcgtcaggacgcgatgctccgacgacctgctgtggctgccgcacgcgacggcgcagtatgtgcgcatcacaggggacgcggaaatactcaaagaaaacatcagattcattgatggccggacgcttgacgaggaagaatacgaagcctttgggaatccggttgagtcgatcgagagcgccacgctgtatgaacattgccgtttggcgattgagcgcggctcgacatccggcccgcgagggcttcctctcatcgggactggagattggaacgacggcatgaatcgcgtcggaataaatggcaaaggcgaaagcgtgtggctcgcatggttccttgtggacgcgctcaaacagttcgccgcgctcacggagatggttaaagacgcgccggttgcggcggagcgataccttgagagagcgaagcgtcttgcgaaggccgtcgagaaacatgcctgggacggcgactggtataagcgcgcgtggttcgacgacggctctcccatcggctcatcgaagaatgaggaagcgatgattgattcgctgccgcagtcgtgggccgcgctgagcggcgcggctgaccctgcgcgcgccctgcgcgcgctcgaatccgccgcagagcgcctcgcgctcaaagacgagaatatggttctgctgtttacccctcctttcgacgccgggccgaaggaccccggatatatcaaggcgtatccgccgggagtcagggaaaacggcgggcaatacactcacgcggcggtgtggctcgccatggcgtttgccagaatcggcgacggaaaccgcgccgcctctatcctcaaaatgttgaacccgatagaacacgctcgcgaaccggaagcggtcgcccgttatgctgtcgaaccttatgttgtcgcggctgatgtctaccgacttcccggtagaacaggacgaggcggttggacgtggtacactggcgccgccggctggatgtaccgggcatggatagaggatgtgctgggaataaaaatcgccgccggcaaactgctctttgatccggttcttccatcagaatgggacagagcaagcgtcataatccggcatgaagaagccgtttatgaaattgaaatcgagaaccccgacggagttaaccgaggcgtcgcatgggtggagatggacggccaacgtctgaagaacacagagattcatctcgatggagaattggtcaaacaccgggtgcgcgttcggatgggggtttcaactcagtgaaaccagcgcgctttgaacatggctttgaagtgattgctaaaagaatcaaatgacgaatttgggagcgatgcgctgagcggatagttcgcgaggcgcgagcctcatttttgaaatagggacgcggtttcctcgccctgtaaaggcgatatttcggcgcccctgcttcaattattcagagagaccgaggcagagcgccgctgtgataattgcccgcgtttcgccttctctatctgcgaatccgagttcatttggccagcgtctcggagattgttttcaacaaaacttcgccgatgaatggtttctgaacaaacgcgcgcgctccgtcgttcattaatcgcatggctttccctgcgacgctgaatcctgaacacaggatgactttgacgtcattccgtatttgccgcaaagccgcaaacgtttcggctccgtccattctcggcatcatcatgtcgagaatcaccagtctgacatcggcttgattcttcttgaacaaatcgagagcctctttgcctccgttggcggcgattgaactgtatccttgctcaataagaaaatccgacatcatatctgtgaagtctttttcatcgtccacgataagtattgtttcttttttgcccttccgcaatgtttcgtccgcttccggcttgtaggccgttggcgcttccttcgcgcatggcagatacaccttcactttcgttccttcgcccggtttgctttccacctctatcagtccgttgtgcgtctcaactatgctcttggtcaccgacagccccagccccgtgcccgcgcccttgtcttttgtggtgaaaaacggctcgaatatttgttcgagcatatccgccggaatcccgccgccttcgtctcgtatgtcgataagacaatattctccgggtttaatccctctgcgagaactgcaaaattcattgtccagataaacaggagccgccccaatctctagtttgccaccctccttcatcgcgtcgcacgcgtttgcgcaaatgttgagaaaagcctgtccgagttgatttgcgtccccgcgaatcaggatatcgcattccggcgtcgttatttcgatattgttgaggacgctgacacgcaatatgtccactgtgtcaatcaggatatcgcgagccgaagcgtcgcttatttccagtttttcctttcttgcgaacgtaaggagtcggcttgttatgtttttcgcccgcattgcggacttaattatgcgtcgcatgcgagcttggttcgggtcttccggcgacatcgagcctaaaacgacttccgatgttccgataataacagcgaggatgttgttaaagtcatgagatatgccccctgcaagccggcctaccgcgtccatcttttgagactgtatcagttgttcttgcgcgcgcaaaagctcttcggtccgttcctctatgacttcttcgaggcattcccggtattgtttaagctcatgctccacgcgcttgcgctcagagatgtcgcggatgttgcactggatcgcataggcttcgctctcaagatatacgttgctgacgaactcaacgtctactgtttcgtatgtgaccgagttcgagtcgatgattcaacgccgtagatcgccctttattcgttttttcggatttttttaatgaaaaatccgggatagatggaagtcgcaagcctagttcaaagcgttctcagaataacgctcttcacgcatttgttccgacaggcgctcttttgctctgtgaattcttgatttgactgtgccggtcggaatcttcatggctgatgatatttctgaatatgtgtatccgttgaaatgaaacattgaaaacaccagcctgtacatctcaggcaacgaataataacgcctcattatctcttcatttatatggttgtgaaaaaacaccgtgtcaggcgagtccatgtgcgatattcgtcgcgcaactttcaatgccaatttgcttttgtcgtgttttctatcgtcaaaagagatttcttgctctttccttctttttactttgttgatatgcgtgttaatcatgattctgctggtccatgcccggaaattcgtgtcaggcgcaaaaccgccgtaaccttcgcaagctttgagaagcgtttcctgcagcaggtcttccgcgtcttccgcattgcttgctatctgcaaggcgcgagaccacagatatgtcttttctttatcaataagtttttccacgtcttcgcggaatgcttccgtcatagtcgctctcctgttcatgccggaaacgctttttaggcgcgggcctcgacatcgttttcatgcgcaaagactcagaatgtattctgcccgtcgcgttgcgcgccattgctcaacattaggctgagatcgcttttattttgcggcggcgacattgcgctgagccagttgcagataaaagaaagcgtgttcgttgtcgggacgtattcgaagagcttcgcgccattcaggaatcgagtccgcgaagcgcccctgttcgaacagtatgcgagccgtccatagatgcgcggccgcaaaatcctcgcttgcggtcatcgcctctctgaacatgtcaagagctccggatatgtcgccaccctgatatcgggcaatgccgctccggtgcgccacatacgcgttgcctccgttctctctatagttcgcggcgtctttccgcatcatcagaagaacttcgtcttccggagcctctttgatccctttatccagaatagccagcgcctcgtcgtacatgccttcattctggtaaatagtggcgagccagacgtacgcgtccgccagtttcggatcaagcaataatgatttctcgagttcttcaaccgccatccagtaatacccgcctgttatatatgtgtttgctccaagccagcggcggcaatctgcggcgcgcttttttacatcttctatcctccagccttcggggtacatcgttatgtaataatcccaccactgagccgctttgccccaccatttcgcgccctcgtacgcccgggccgcttttgttataacgttcccgtctctcggattgctttgcaaatgcgtttcatagtgcgcgatggcggcgcggtaattttcgctcgccatcgccctgtctcctttttccaccgatgcctcagcaaccgcgcttgccagcaatgaaaacgcaagaatcgtcgcggcaacgatgttgcgtcccgccgcgcctcggcttgaaccctttgcgcaacacaagcatctcagaatgttcattgcttctatcttcttgtaatgtttcattatattcctccgcgcttttctgtaataacagcgctatttgcacaaatgcgctttttaacaagtcgtctcttgttcgagcaaaacgcattagctcagcctctttctaattccttgcgtctagcgatgtcggttaagcttcagtctcttgctttttcgtgtgaatcaggtccgccaccgcatcgccggattcatccatcgcctttttcatgctcttggtaatatcgcgcgccgtgtcggcgacatcctcttttcgagcagcgatcttgtctatggctttttcaacgttgtccgacattttatccatagccttgtcaacgcgctcgcctagcgttcccttgtcgctcttgcttttatcgacaacgttgtcgatgtgttcgccgatcgttttcttttcattcatgttttgtttctcctttgtatttgtttgctgcgtcaatgatacgtcgctcgcttaacaatcgctatcggctaaaaagcatatgtttgtaaccatcgcggtttatatatttagccacatcgactaacggatgaacacgaagctgacttgatgacggattgcgccggacactaatgctcgctctgccgtcaagaggcgacaaccgccgccgcaaggctgtctcaggcaacaagattgaacaggaaaacattatttattttagtttgaagcgcaggcttcgcggagacgaggcgtttcgggcgcgttcgcgttcagataatccgttagagacaacaatttaagcattcgcatcacattcgcctgcaagcattgcaattcgaatgagccgctccatctgtcagtaagcgttcttaattgcgccaaaagccccgcgccggcgcagtcaagaaaagtcactcccgccatgtcaaacgaaagggacactccctgacgcatatactcgaacacaaggtctttaagtctttggcatacatcgtaagccagttcaccctcggctaatatcaatgtggtttcattctcattaactatatcgcaactaaacattgtttcgcatgtcctttcaaaacacagtagcctccagttaaacgattcttcgccccttaatgactctcaccaatacaactacgactgcgatgacaagcagaatgtgaatgaagcttcccatcgtatatccgctaactatccccagcaaccacaaaattgcgagtattaatgcaatcgactccagcatgagcaatcccccggtatcaatcgtttctgacgccgcgcgcgccgcgcttagtcaaagcgtcatccggttgaaaacatcattctgtgacagattatgatcgtaacaataaggcgttataacgccttgcaaacagtcataaacaacgtcgaattcgcatggcttttctatatacctgtttgcgcccgctaaaaatgccctcaacctctcatgcatccctgtctttgccgtatgaatgattatcggcatgtatttcgattggtcgttcatttttatcttgcgacagacttcgattccgttcatgtcaggcagcataatatcgagcaaaaccacgttaggttttttttcggtcgcgaaggttacggctgtttcgccgcttcccacatcgaaaaccgcgaaatcatctttcgctaaaaataactctcgcagtttctgtcgataaagcttatcggcgtccgctatcaatattattcttgatgccacggcaaagcctccttttcgcgcttgttttgtttgcgctcaacattaaagggacactgtccgcgcgctttaatgaattaaacagttgagaccttgccgcaatccaagaagttcaaagcgaggccgagcgtcgctttccatgtttcagcgtgagtaacgccgccggcctgctcgtgacatgcccttggagatgacattagattatgcgcgcgtgagccgcttaatcagagcgcgcgcatagccgcgcggaacaacgcgccgtcatttcttcgatttaactaggtctgaaatagcgtcgccggtgtcttccacggctcttttaacgcttttggaaatttctcttccaactttagagacgtctttttttgccgattcaagtttatctttcgtcttgtcgactttgtctgaagccttatccaccgccttgtcaacgcgttccccgattgtctttttgtcgctcataatcttttctccttttgtttttgaatattattctcaggctcaagttaattgcgcctgattgcattcatctatgtcgcagactgaatgagagccgcacattcgtctgttatcctcaatccatcgagggtctggcgaacaacttccaagagcggttctatgtccgacgatttggtcacccatgctttcgcaagatacgccctgaaatctttgcgaaacagcggatatgcggtgttcactatcaccgtcctgccgcctgcgcacaaatcggagagcgcctcaagcccgctcatctccggcatcccgatgtctagaaccactatgtccggctgccattcgcgcgctcgctctatcgccgacgctccgttatccaccacctccactgcgtatccctctgtttcgaattcctcgcggtagagttcggccacgcttgtgttgtcttccgctatcaacaaccttgtcataggcttccccctcagccgcgcaatttcaacttgcgccgcttgtcatcctttgtcattcatgtacttcttggtttttcgttctttcttattgaaatactgtttgaacttgttgatttgtttctttactcccgtcaattcctttggtttctgttctgactgctttttcttggcggccgccgctgaggcgtccttcttctttttatcagaagcggatttggctttagctttgttggcgtctctctgcttctcgatgtccgcccctatcgctttgaagcctttattctgcttgcgcatttccattattttctctgccgggtagttataatgtcctgacataaaccttaaatttactagatttacgatgtcgtcatcggcgagttttatcttgttccaatctttttgcggcttgtttttataatacccgtaggcctttccataaggaggccctgccgccgcgccctctctgagcggcacatgatacgattccgccccgaacccgtatcggtttgatatttgttgccacgtttggccttttagccgatagtctgagacgatcttaggagccacattggctttccgcgaaataaaaaacacaaccggaatatcttcttccgcgatgtttcgttgcctgacattcgcaacttccgtcttcggaacggcaaaatactcgcttatcgaattcataaaactgtcggaggcggcgtccgcggctctgttgaccgcgctccccgctaacgattcgcacatggtctcttttgtcgcgacagtcatcgcgaacaaaaccaatatcagcgccaaaattaatatccttctcatctttacacccctcgttttagaaatattccgttgcatacatcatattgctctcaagcgggttgcgctatcggcaaaaaagcaatctttattagctcatgcggcatatatttgtaactgttttagctaaactcagatgaagctgcgccgcgcaataaatagcgtttgtggctgcgccggaacttatatgctcgccacatttagcgcttcattaagagacagcttatcaaagggagccttaacgcgtttggacatgtttcttatttcaaaggagccattccaagactcagccaacttcttcatgcttaacaaaagcccaacgccggcgctgtcgaggaatgacacttttctcatgttgaacaacaagcgcatgcccggactcatacagcttgtgacaatctctccgaattcatcgcacacatcgtatcccagttctccttcagggcaaaccatgatgtattcatattcattgaatattcgatacgtaaacattgtctcccccttttcttcgcccgcgcgatgcttttctctgactaatgcgcacattcgcttttttcttagaacctatcagagttgaccgcatgttatgagtcgagtcattattgaaggcttttgcgttgcgcggcgcatataaaactccgcgcttttcttatttcggcaatattggcgcattgtttaagctgttggatatctttctttttgcgaaatgcttctttattaatggagcttgcgagccttttgcgtccttgctcataatttgtcgaatttcattgtcaggcatagcaggcaatctatttccagagtctgccttaatttcgaaatacggttgcgcatgttgtcggaatatagatactttcacatcggcgtctgatttgccagcttctaggttatgtgtgttatcgttattcttgctggttttctcgccgctttttgacactttatcaatttcttgttcgacaagctttatgttatctactttttctgtcatgacaatcgtctcctttgagatgcttcgtttatatgctatttgccgataaaaacacgatattcgcgactttgacgtctttattaatcataaacagcaatactttaggcgctatcggcgcgagagcatttactattaactattaagtcttttatttatagctttttcgtctattgcgacatgaataaacatgcaaaacaactttcgcgtcaattcttacgacacaaacgcaatccttcttgttgcggagattgcagatcgcagttgtaagacgacaaataaaaaagccctctataaaagagggttatttgcacatggtcccaaggaggacctattcgccgttttaatttgagcgcctcgtgccgataaagcggatatatgactacagattctttctataactgatgcccacgcttatatcttccacgctcagaatgccgaaatgcaatttggcggattcggacagatcgtatctcatgccgaaattgaagtggtctccgtcatactcttccatgaaagtggtttttttcagggccttcatgaacggcgatttctttgatataaggaatcttgcttcgagtccgtagaacagggagtcgtcgatgtcggaggttctgtatcctacttgatatctcagcgcaattttgtcgatccgatgttttgaacggagctttttaccggaagtaaagttcttgctgaccaccgcgtatttagttctgtttgtggaggcgaggtctaacaatcccgcgcttacagcaggatgctcttgcgcttcaggaacaaaattccatttaaggttcaaagagccttcctgttgaactttttcaacgaatgtcacgcctgcttcaaagcgacgaggtagcccgacgttggctttcacataatccttccatccaaccacgtcaacgctgacgtcgtaatcccacggggcgagcacatacgcgctgggattctttacaagccctgtcggccctgcgatagacggaccgttcggtatcatctcgccgtcaatatatggatcggccatcgtatattcatgcgtttttgaaccgtcttccgcatagcacaatgcggacgccgccagcgttaatgtcgcacaacagaccgcgagaaacatgtaatcttttatcagtcgcatcaactatcccccatgttcgccaatgtttttcatccttaataaatatatagttggggaaatatacgcgctatcggcaaaaaggcattatttcataaccaatgtggcattattttgtagccttttaggctaacgagcggaatgagcaaaattgcgctcaaacaacactttaatatttgctcacatgaaagatagttcggcgtcgcttttttggtgttgcgcgtcgctgctttcgaaaagtatcttcatctcgccgtcggcgctaatcattatcgggatgccgccgtagcggcgcgcggattgggcggctatggtgcgcgctccgagatagcttccgagatcgggatgctgttttatcatagcgcctacggctatcaactcatcgccgtcaaatatcacagccccgtcaagaccggcgatttcaagaaacagatttttcctgctcgtcaaccgcgcgttcatgccgaggcggatatctcgtattaccggggagagcatagcgcgcgccgtgtcgggcgtgggcgcgattcctcctattatcgactgtttattaaccacgtgttcgataactttatggtcaggatcgtacactagcaaagctccgtgacgcatgtaactgaggtcaaacatcagctcgaaaagatttcttccgacgttgatgtcgcccataatgtcgcacacgctgtttttgaacgtttgggcgtcatacacgcgccatcgtcccttcctattcgcggcaagaagtccgcgcgagtccattatgaagatgtctccacgctgtcgcagatgaactgagaattctccgcttttcaggattgaggcgaatggctcaagaaactcgggaataaacttcggctcaaaagactcgctgacatccttccacaagatttcctgatagtctaaaaacctcagttctctgtccacgcgaaaatagacttgcatgctcgacgcaagaggatctacaatcttttgaatcgaagcgtcagacagcgacaacgcgccctctccctccccgatcacgatgttagtcatcacccgattgttctcgtaggttctgaacctgacatcctcgatgtatgcgataaacttgttccagttaacgcccgcgtcgaatatctcaagccatcgcaccgcgatatcctcttcgacctgttgcagtgagcgtggggtcggcacgactggcatccttgctctccagatatcgagattgttctgaatatatgatattagcgatctcaaattcggggttaacggattgtgagagcaaaatacgactgtgtgagcgcccattgtcaattcgaacgcatgattcgcatgctcgcttgaataccagtgcgggaccgtcgagacagcggccttcattatgatgcgttcataagatagcatttttcaatatccaatgttaaatgaatctctgaagaatgcgacctgccggagtttgcgcgataatgtgatgtctaatcattcaagactttgtatatgattgttatatcgcggataaccggcacagcttttttcatgaaaaattccttcaatgtggcttttcgcttaggaacgttgatgacatcgccgggacgcagcgacgggatgtcccccgtcgtccggttcagattccccgcctcgattatctcaggtcgttcagggtagtttcgcgttatcgtcaccccgctgtcggcggcgttcgccgcaaacccgcctgagcgcgttatgatgtctagaatcgtctgcccctcgacataaggataaattccgggagtgttgatatatcccgtcacagttatggactctttcttcgcgggctttacaagcacgacatcgttaggaagaagctcgaatccgtccggaggatttctgactgaaaccgaactcatctcgccttgtcgtatcaatgtcacttccgatgagaatatctgcgcgtcaagggccttcgccgcggctagaagtccgattaagttggctgcgttttccggaatcgggtagaaacccggctccggaacatctcccagcacctacactgaagtcgttccatgatatgaaacataaatggcgtcgccgtctatgagttgaaaagtttccgcgctcggcggcgatatcgagcctcgtttcagcgccaccggcatggacacgccgcttctgacgacgaatactttgcgttcatccattctaggatgcgcgagccgcgcctgcgcgaggagtttgtacatcatatacgggtctgtgagttcgtaaggccccggcgctgtgatttcgccaaggatataaacttgcggcttgtgaaacctcgtcacaagcaacgaaaccttcgggtcttttatgcgcgcggcaatcgtctgttccagttccgcgcgtatttgctccgttgtctttccgagcgcgtacatgtcttctatcagcggaaacgatatcatgccgtcgggcctgccggtcactgtttttaaaaggtcttcattgccgtaaaccgatatctccatctcgtcattcatgtgtatccggtaaacatccatcaccggattctcgccgattgcgccggctcgcgcgagcgtatacgccgccagcacggctgttgccgttaggctagccaacaacataatgcgcgagcgattcattgtcataacctccagaatttctagttgcggactgcggcctgcgcgccgagcggcgccacagtcgcggcgaactatacttgtgatgacaaccctctaaggtctgcgacttgcttgcgaagactgcggttttccgcgcgggcgtccgctctcggtccgagaaatataaaatattcaaccgcgactccgagaataccactgccaataatcagcagaggcagtttcacgctcatagtcgccaccagaagatttatcgtggtgtcggtattgttgacaagcgcgagaatgacgctgattgtcaaaacaaccgtgccgagcatgaaccagatgttttcccagaaacgtctgcgttgcggcgtcgcctcaagcttagcctcggctatggcgttttccgcgtcttgcgcttgctttatgtcgttttttcctgtcatgcgttctccttttttgcggacgcggagcttatccctcaatgtccacaacgactccttcctccgccgcaagcgaattaatgattttattcaggtcttccccggtcacgtccagaaacggaatgtcttctgtttgcttgataacaatcccttttttctcgccgataagctgtatgcgaaatccgctgttctttgcccacactctgacagagaaaggctgtttgcgctcgatcatgctttcattgaacttcgacactgcgtccagcgccgtgttccagagcgctgattttggccgggctggcagcggcaagcctgtattgcgatacagaaaactgtcgccgtcggcggcgattccggttttgcgccccactttttttcccactacgcgcgagaccgggctgacggtcgaagtctgatcgattctatctacgctgtcgattgaatcagagccgagcgtgcgggtgaactgatctcccataggattctccttttttcgaacgtcaagcggccggtctcgatcaaggcccgcggctgctattgtttaagtagaagccccgcagttgtagcttccgtcttttcgccgactgtcacggcttcgttcttagcgcttgctttaggcggccgaaaaacgaaatcgtctctcgaacatgccgccatgtgcatcagggccgcgccttcgctcagtatgattccgccggatttcacggaagcgaagaaaccggctccttcgcctttgcccccggtcgatttaatcggattgattttaatcagttttatctttgcgaacgcgtcttgcgcaagcgtcagttcgggcggtcgccgtctatcctgttcctcgtctaggacgaccctcgtcaacaccgcttccatcgcgtaagatttaagcagattcggaaagatatccgcaaacacgccgtgattgtaaaataaatcaagataccaccatgtgcggtcgatgaaaacaacccagccgacctgcgcctccgtaaactctatgcgcgagacgtactcatcgtgaaggatatccctctccgcgtatagcgcgcagatatcgtagttttcggtctttatagacgaccgctcaaaaaggccttcgatatgcttccataccatattttgatccaccctcgacgcgccttctttgatcatcgtcggaaacgacttctcaaggcgctctcgccggaggctcgccggagcgaaatccgagcggtaaaaagcggggtcggtcgccgttattctcgaagctcccccagagagcgcctcgcattcccagcggctcgcctcgacgctgacagcgggtaaaacaacgctttcacccggtcgaataaccgcgctcgccgtcagcattctgttagccgctcctccgatcaggattgccccgtccagcgccagcgcgggcgtgtcgccgctgttctctatgcttaccgaattcattttgcctgtttccatcgcttttatgccgtcgccgagttctcccgcgcctatgacggtgaaaagctctttcgcctcgaaggcgggcgaaaccaacgtcagagggaatacggcaagtcctccgtattccctcatgtcttgcactttgaggtagtccatgaatattgaaggcgtcggcatgattttctccttcagcccgagtttcgcgttgccgttcagtctttttctgaagcgtctttttttgcggcaaaccgctctttagcattgccgacagcggcggctgttttatcgtgcgcatgcgagaccatgctttttgcttcgccgcaaacgtcgcagaccttgtcagacacatcgtcccattattccctgatggcggcagtagtttctttgccgcttgcaggcgctagaagaagcgccgctccggcccccgctatcgctcccgctccgaagcctatcaaagcgcgccacacattagtcctcttctgcgcgttaatatcgttctgtttggatgttcatttcttttctccctttttgatttctaaagcacatgcctataatgaatatttctatcattattctaaattgttcaaccatagcatcctcctgatatcccgccgcgcagagcatatttgttattgcgcaacaaataccttgccgaaagaaacacgacgacaattcgtcccatgaagatgtatgtcaacacattaatgatacgattgattggaatccgggagtatcggcaaaaaagcaatctttattaactattacggcattcatttatagccattccggctaataaacgccgcgcccctctgagccgtaaatgtggttcgaaaaaaggcgttgatattttcaaatgtcagatcgggcgccactcacaaccttgtgcttgagcatcgttaatattcagggattgttaaaaaacttgacactttattcccggaacggcgaaaagcggggacaggcagccgcaaaagacgcgttgcctgtccccgtttttcgctcgaatactcagccagtgaaaaggcacaatttggagtgcggcgatggttctgggtgccaccctgcatacttgagtgaatggcagcaagttggtatcagtcataagaaacgcgtgatttggaatgcgcgattcatcgcctgtttcctgatgaaagcgacatttcgagcggggcaaccccgcccatacataggaataaatgcggcgccaacgaagcagttcgcctatgtgataaagcgttccgactcgccagttcttcagcgaatccttttattgcaatcgagcgattaatacagacgcgcgcgcgcgcctgatattatgatttttcgattagtcctttattaatggcgaaaaacgtcatgtccgaatcttttttcatgtcaagcttccccatgatgcgatacttgaaggttttcaccgtgctgtaggacacgtcaagttcgtcggcgacttcgctcattgtcattccgcgcgccatcctgatgaatatctgatactctctctttgaaagctgggaaagcaggtcgccttctttgtcatggtcgttttgattcgttacggctccatttgaagccgagaaatagatgtctcccgccgcgatttttcttatggccgcgcatagttccatggctgagattttcttgcacaaatagccggccgctccgctcttaataaaacttattgcaaactcttttctgtcgtatatcgtaagaattagaatttttgtgttcagtttcaactcgacgatctgttttgtggcttccagtccgtcaacaaccggcatttcgtaatccagcacaaccacatcgggtttcagctcgccgcacttctgaacagcctcgcgcccgtccgaggcttctccgacaatctccatgtctttttctccgtcaatcagcctgcacaatccggcgcgcaccactccgtggtcgtccgcaaccaaaactcttatcatctttttagcccctccaacgggcttgtgaaccttaattgtttctaccgccgcgtttgcgggttttgatttcttttttgcttttttgccgggcatatcgcttcctccctctttttcctctcatatcggaccgccaatctctttcttcacattgaaaggaatagccacttttatgtgtgttcctcttccgggcgcggaacatatttcaaaccgcccccccatcatgttcgcccgctccctcattccaaggatgccgaaattgtatctgccctgctcgctgtcttcttcaattccgcaaccgctgtccttcacctgaagaacgatttcagaatcagtttccttcaaagatatcaacgcggttttggagcctgaatggcggacaatattcgccagagcctcttgaagtatcctgtacagattgatggcgttgtcaggactgacgcgagactcgtcgacgggcgttatcctagattctatgaagatatcgctggcgttttccaaatccgcaatcaatgttttcatagcggcgttaaaccccattctatccataatcaaagggcgaagaccgagacatatctgttgaagttcttccgacgcttctatcgtctgcttaatcaaattattgtaaacactcacatccgagcatgcgcattcgcggttcctcagccattcgatctcaagttgcatggagatgattttctgtccgatggagtcgtgaagttcgcgcgccacttgtttgcgctcttcttcctgcgattgaatcattctgcgggatagaaacatcaactcccttttcgcaaggctggcttgcgccttcttgcggtctgttatgtcgctcaaaacagcccgataaacaacgggcgtttgcgcgtcgcgcgtcacggaggtttctacttgcgcccacaacagggaaccgtccgcccgcttcgccattatctcgtacgcctgcggctcttttgtctccagtagtttcttgcggcgaaggtagtgcgcgtcctgatattctttagaaataaacgccgaaaacggttttcccaccagttcgcttctagcgacttgtagcagatttgaaacggcgaggttcgcctgaagaattattcccttttcgctgactgataaatatccgaccggggccatgtcgtaaaggtcgtaatattgcgcctgcgacatctctaattcatcctgcgcgcgacgcagttcctcgttctgcatctcgagttcaatctggtgaacgcgcaactcatggagcagttttcttatttcgtcggtggacattaattccagacgctcatgagcgcgctcagcgtttttatcggcttcgacctcggcttttttgcgaagaacagctaacttctcctcttcgcgtttgttatcgttcataatcatttctccttatgcaattcagccgccgctgcggctatcctccgcgcgcttgcgcaggtcatccgccggggcggccctcttgtcttctctgtcagacattattgtcgataccctgtttcaatcgcttacaattgaattgcatcgtttatgtcagccacttttgaatcatgcttatgtattccatattgctgaaaggtttggccaagtgatccattttcggatccctcgtctctaattccatcatggactgcaaatactcgaagttcccagacacgaaaattatcgggatttcggagtctgtttccctgattctttcgtacacctccattccgttcatatccggcaggacgaaatcaaggctgatggcgtcgaaagaattcatgccgtgtcgctccagagccgttttcgcgtcaacagctagggtcggataatgaccgagtttttcaagaagcaaacatagaattcttcccagttgcggttcgtcttcaacaacaagcacgtttttccctttcgcatctttattttcgctggcaaccgccttcctgtcgccgcgggcagcttctgtgattatcggcagcgttattctgaaaatcgcgcccttgtccgcttcgctttcgcactcgacggttcccccgtgcttgtccatgcaacgcttaacatttgaaaggccgtatccggtgccttttacgtccggcgggtaagctccggtcatatccccgctgcctttcaacgagaacaagggatcaaacatcttgtctttccattcacgaggaatgccgcagccattgtcggcaagttcgattcggatgatgttgttttccgcgcgcgtttttatgcgcaacaccggtttttcggttttgctcatagcttgtgtcgcattattgataaggttgatcaaggcgttttcgagaagcccggcgtccgcaatcacgccatccaaacccgctccgtaatcgacgaccacatcgatattcttcaaattgcctctcagcgtcttgataatcatgtctatcttgtcgttaaggctaaatcggcttagtttaagctgctgatccttggcaaagaacaataagttccttgccagcccgcctcctctgtttgcggtttccagaatggtttcgacatctgatttcacgtccggcggcaagtcttgggtcaggagcaattcgctcgttcccaagatgatggttagaacgttgttgaaatcgtgcgccatccgtcccgcaagctggccgatggccgccattttatcctgttcgagatactttctccttgcgtcttcgtgattcttttgttccgtgatgtcgctgagcgcggctcggcacacctgcgcgccatccgcttcgtgcgccacaatcgcatggattcgcgcccagaagaagtcgcggtttttccccgctattcttatttcgcatacctgcgggtcgcctgtttcaaacaattccttgcggtgtctgtagtaaatatcctgatcttcggagagaatgaatccagtcagcggctttttcaacagcgagcttcgagacatgcccagcagtccggcggcggtgagattcgcctccagaataagccccttctcgctgattgtaacgtagccgacaggagcaaggtcgtacaggtcgaaataccgcgcccgcgacgcttcaagttccgcctgcgcgcggcgcagctcttcgttctgcatctcaagctcaatttgatgcacgcgcagttcgtggagcaggcgttttgtttcaccgggggacaactcgtcaagattaacaggagcgccggatgcggcgttttcaagcgctttattctcggcccgcgcgcgaaggtctgcgtccgcttttccccggctattgtcatcgcacattgtcgcccccgttctttttcggcgatgttttttcttcgccggattcagaccggacacatttcccgcgcgcggttattctgacaaatgtgacaaccacgccctcgataacattttccatggttcggtacggcatgattcgcatggtgtacgaatcgcccttcagggtcttcacttcgcgctcttttgggatcagcgtgttcaacacatctcgcgcgtcggcgaccagcccgtcgtatccctcaaggttcgagacgatatgcccgacgggacgccccacatcgctgggtatcaggttgataatctgggtggcggtcggagtgaatcgcatgattcgcagttggtcgtcaacgaatactgtgccgattcccgtgcctgccagcaggttgttcatgtcgttgttggctctcgaaaggtcgatgactttctgctggagttcggcgttgactgtcgcaagttcctcgttcaccgattgcagttcttctttggacgtctcgagttcttcgtttgttgactgaagctcctcatttatcgactgcatttcttcgttcgaagaccttagctcttcgttggatgtctgaagttgctcggtggtggtctgaagatactcatccttggcgcgcaattctttcctcatcgcctccaagcgcgagccgatgtctgttgcgttgtcgaaagcgccgtctgtgtcggcggcgatttctcgcttttcactgtctgatatccgaggctcttcaatgatgacaatgaaaagctcttgcgctgtttccgcgccagtgggcgccggaatgggttttaccgtcagatttaccgtcgtgaagtcgccgtttgttttgacgcgcaggccgtcatggcgcacggcttcctttgagacggcggttttgtgcaaagccgttgttagttcgcggcccaatccctcgcgggccatcttcaacacattggcgacgcctgcgacgccgggcgaaggttccagaaaatggccggctcgtccatgtatgtacaagatgtcgccgccgctgttgactattatgccggtcattgccgcgtgttgaagcagcgccttctcagccaactctcgaagaggcattttatattcatccgttgtttttcttttttggcgggacgaggcttcttccgtcgccgaactcggaagaaagcggctgagggacgcgcgctgcgcgccttgaatgtcatctttgcgccgatatagttttgctttgtggtccacggaggcaaaaaggctcgcgaaatcgccgattgtctcggatgtgccgagaaaaagaaatccgttcggattcaacgcgtaatggaagaggggaatgagctttttctgaaggtctccgcccatatagattagcaggttgcggcaactgatgaggtcgatttttgaaaagggagggtctttgattacattctgttcggagaaaatcaaaatatcgcgaaggcttttgcgaatccgataggagccgccgccgggttcggcctcaaaaaaacgctccagcctctcaggcgagacgtcggcggcgatgctggccggatataggcctgttctggcagtgtcgatggcgtggccatcaatatctgtggcgaacacctgcaatttgaaattttgtttctgttcctcaagtcgctcctgcagcaacatggcgatggaataagcctcttcgccggttgagcatcccagcgaccagacgcgcagcgcggcgcctgcgggcttgcctgcgaagagaagcggcagagcctgtttctccagcgctttgaacgcctcttggtctcggaaaaaactggtaactccaatcagcaggtctcgaaacagggcgtccacctcgtcctttgaccgctgaagatattttatgtattcctctatcttgtctatctggttgacggccatccggcgctcgatccgccgatggatggtattgggcttatattgggaaaagtcatgtccggtctggttgcgcaacaggattaaaacctttttcagcatatcttccggtttagggagagagcctgcggccgggcgcgttgttttgccgaacgcatgggcggcgtaagcgattagttgcggcggcatttcggcgggcggcagaacataatccaccagaccggttgcgatggcgtttctaggcattccgtcgtattcagtggattccgggttctgcgccataaccatgccgccctcgcccttgatcgcccgcactcccagagcgccgtcgctgcccgtgccggagagcactatgcagatagctcgctcgcgctgatcctgcgcaagagagcggaaaaaaaaatcaatgggaagccgctggcctcgcggcgcggccggctccaacagttcaagcgtgccgccgataaaagccatgtcgcgaccgggagggatgatgtatgcgcagtttggctccaccaccatcccgtctttaacttctaataccttcattcgagtatagcgtttgaccaactcggtgaggatgctcttgtgatccggagcaagatgctgcacgaggacaaaagccatatccgggttggcgttcgcgggcatgcctgaaaaaaaagcctcgaacgccgcaagccctcctgccgacgcgccgattccgacgatggggaaatcctttgggaggtcttgttttccattgtctgcggaaacctcatccacaagcgtcttcttgggcgattcagcgggggccttaacatcggtttttatctttctaggcataaaacagtctcctgactagtcggattggccgatagagccggcaaatcttcggcaaatttcataacggcgagatgctttgttgacgtcgcattttttaagcgagaaccttagcctgatttttcctgtgaaaaatccgagttaagtctcttttgctgcaaattgcgcctcgagattcagccgtagaataaccgcgccttaatcccagaaaaggattcggtttgacagaagtgaatcctgtggcgctttccatgttgcgcaaagatgtggttctcagactcaacgaagaggctcttttctttaattgtaactcacttgaaactaactcgcgcgtgaattggaaaatatacttcgccggaatgtgaaagacgcccgtttaatctgcggaagagattgaaatatgccgctttatttcgtcgcgtaaagcggcgccataatttgccttttgcgagtgggctgggttcttgtcggtggaagcgattgccgggggcatagccgagcaggctagctgaaaaaccataaccagtagtcggaaataacacaaatttgtcgaagttacgcattagattcacggaatacatgcgcttgatgcaggccgagtctgtcgttgagcattttctgtatatgatcgtggagaccgtcaacgagggagcgtacgcgctccgtatcgggctcgacgtcgtggcaatcttcgtaataatgtattggcgtgtcgaagtgcaagtcgaactttgacggaaacggcaaaagtccgagcaagcccagccacggaaatatcggcgttatcggcagatgtttgaaccccatcactttcatgtcgagtttgccaattgtcatagcggattcctccgagccggtgacgcatgccgggatgattggagcgcggtactcaatcgcgtattccatgaatccgggggggaacgcgtccactttgtatttgttgaagatggtgtggaagtcgctctccgcgccggtgggaaacacaacaatgaggttttcgttctcgaagattttcattacgttttcgtcgcagccgactatctggccgcaccggttcaagaggatggagccgccggggatgcctgaaagcgccctgtggattattgttctgatgaatcgtggcttctcaagctccaccagcccggcggtccatatcatcacggcgtcgaatgggagtatcggcgcgtggttggacactatcaggccgactccttcggcggggatgttctgcgcgccgtgcgcgtccacgcgaaagtaattcatgtacatgaacagcgccgccgctcccgctttggatgtgacattcaggctggttccgaactcgtcgtatccgcttgggtcaaactgtatgtccgacatcagtatgcggtttctcatatattcggtcgctgtgccgtcgaagaaatgcttgaatttaagttttctgtagtcgtccattgtgttcacaagtcgatttcccctgattgcgatagtttaatcatcctcatcctagctctgggcgcggcgaagtctgattcgatgcgccgcagcgcctttctttttcctttccgcgcggattttctcaaatccggaggggtcgtatcccagttcctcgaacgcgcgcgcgccgtccactgtgaacggatactttatgtaattgagatcgaatttcagattgttcgaccacatgaacctgcctaaacggcgcgcgagaaattcaggaagcggcgccggcgtctttccgaacgagcggataacctcgcttaacggcaggtgtgcgcgccctctgatgttgtacgcgccgtgagcgttcgggctgcgcagaactcgaatgaaagcgtccagcatttcgtcctcgtaaataatctggaacatggggtcgaacccaagaagcgtgggaacaagtttgcctttcatataagcgcctagaatgctggctcctgaatctcgccagatgggaaccatccgcaggatgatcactctgaggctgtcggagctttccgcgtgcgtttggcaaatcatgtccgcctcgatgcggtctctgatgctgaggatgtctcggttgccaagcagaggacggctttcgagaataaccgccgggttgtcctgccttgcgccgtaaacgatggtggagcttggatatatgaactgcttgaccccgtatttgcgcgcaaggccgatcatgtggaacgtcccgtaaacgttcgtcatcatccgttcatcagtagtcaggctctcgccatggccgagggcgagatgcgccacggcgtctatggttccctcgtttttaaacacatcctcgatgcgcttttttcgcgcgtctccgtaaatgcgctttacacccagccacttctcctgtctgtcgtcgtccacgcagatgtcaacgttgacaatgttaatgtcttcgccccactcctcgcgcatcctcacggccagaagttttcctagatatcccgaaccgcctatcatgagcactttcatccgtcgctcccaatgttaacctgcgttggcgaaaaatgccggttaatagagttcttgtttccgaatatctcgttccgcctgtccccagtcctgaacagataggccctcttgtcggcctcgcagttcgtatagttcataggcgcgctttgcaatctgtgggctcaaatcgaccgcattctcgtctctttctgaaatgtcatgcaaaatcccagagagattctctttttctgtgtcgatcttacccttgcttcttgcaacctttttcgacacattacccgcgcgtttttcgatggttcttttgtcactcatgctttttcgtctcctttaatttcgaaatatcgcaatactccaacacgctcccaaaccaaacatattaaacaaactatgagggctgttgctcttttgagattattcgtattagcttaacaataccccaagccacaacagagtacacaataattgcgactaccgttgacggctcaaaaaccgaagtcgtttctatgccttctgaaagccccctgcggaatatgttttcaaaaggcacaatgaaaaatccggttaatccataaatgaatttcacaaagccgctagaaaggttggctcccatcaacttaagaacgaggcggaaaaccaaaagtatttccaaagcgccaaagaagtaatagactgaatatccgcccgtctgataaccggttgccttcttttcagttggagtcgtcacagcgcttgcgtcgccgatttgtgttgtttcagtctcttttacaacattttccatattcgtatcctccgattattattgatgcgtcggcccgcgttggcgaaaatgcggttagcaatccgattgaatactaaagcacaaagacagacgacgcatgcgtctgaaaaccgctgcatagacaacatgttgcatgcgccgtcgtttttgtgtggcccaaatctaaagcggcctcgccagaatcacttgacagctttcttcacgttctttttaatgtcgtgcgctgtgtcaactacggcttcctttactttatcagcctttttcgacactttattcacagctttgtcaacacgttccccgatgcttttcttgttgctcatagttttccgtctccttttattttggtttatcattatcggttcgtaatattctttccttatgcgctatgacttcctcgcccgggaattagctccatcagcctacgggagaggaacgatgatagtgtttgtgtccaaagtaaccgcgccggtgtcgctcgtcgctccggccaatactctgccgtctattctggagccggaaacacaagtgacgcttacgccggccagtatgtttccagtgaagttagcgccggctccaatagtcgcggatgcggaggcaacccaaaacacgttcccggcctgcgcgctgttggtcaccgaaacatttccagcgtttgcagtcagcgaggagccgatcaagaatacccagacggcattcgggtcgcccccgccgtcgagaacaaggtctgtgcttatgttcattgtgctggcggagctatagacgcccggtggaagtgtcagcgcgcccaaatccgcagttccaacgtctgcgtctggcgtcatacctatagcgaagttatacgcgtccaataagtcttgttttgctagaactgacaccgcatcgttaatgtgcgtcgtgccggtcactgtcggacttccggttattgatgcgcccggactcaatgaaacatttccatctatagtggttgcgccggtgttggtgatggtggcggctgccatgactccgaaagcgcaggtcgaaccaagcggaactgcgcccggagtgagttgcatggcaatcgtaaccgtgtcggtggcgctgtttattattccgtcattaactatcaggtcgaaagcgtatattccagtggaagtcggagtgaatgtaggcgtctgcactgtgccgctcgacaatgcaaccgccgggccgccggactgcgtccactcgtaagtgagggggttgccatccgcatccgcgctggcgcttccgtcgagagcgaccgcggcgggaacgcacggcagaatgagcgtttgatccgcccccgcatcggcgaccggcgctatgttgataagataattcacatgcgtattcgttgcgatgtcgtccgcgttgagcgatgtgtcgcggcaggcaatatagacagttacagcgcccgatgcgagacccgacgttgcgcagctctggctcattgtgccgtcgccgtcgcagtcgtcggccatgtctccgtatgcctgatcggcaagcgaccatttgcaatcagcgttctcattcgtgttgaacgtaatcgtcggcgagtgggttgcaagcgtcgaatctttcgcaggatcccaagcgctctgaacaggcggcgttatatccgcggttgtaaattcccacgtgtaatcagacgccgacgcaaccacggatgcgaactgagcgaccacggcaaacatcgctatgaaaatgagggctttgacggcgccgcagcgcccggccttgcggctgcccctgtgaacggaattgattattcttctaatagaatgtttcataatattcttccatgttttgtgtattgcaaacatttcactttatcaaagacacatagacgatgtttctaaacttctgactccctgttgcccgcatcgggcaatataagaaatcctttagttgccgaccaactcattgccggccacatccttggctccggcggggcctgttttgatcgtggcggtgtaagtggtcaattcatcgagagcgctgtcaggcgtaaaagtcgctgttacatcgacgtacgccacagaacccggaatttccgttactccctgcatcagggtaaatgttgccgtggtgattgtggcgggatccatcgcctcgctgaaggcggcggtgattactttcgtattgattgccacgccggaggcgttgtttaatggaacaacggcagtcacagcgggcgcggcggtgtctgttacaggcggcgggttccattttccggttcctccgcatcccgcaattactataccgatcagaattaaactaaacaaaagataagcacgtcgactcttaaagatattgatgataaacattttcatgaaatctttcataattgtcggcgatacatatcccttcgccttttgttattctctatgcataaattatctgaaatatcagaagccaatgatatcggcggaaaagcattcttgattaactcttatggcttgttgttgtaaccatattggctagcgagagtcgaatgttgtattgattagttgatcctactgtccgatatttgcaacctcaaatatttcaacaggaaacgactttcctttgagttgaaccggcgctaatgcgcgtaacgttatttttccttcaacccgcagcaaagcattctttgtgattaggatttgtccggcgcgcgctattgactctaccctctgtgcggtgttcacgacgtcgcctatgatcgtgtaatccattgtttcttcagttcctatgtttccgacaaccgcctcgccgtagtttatccctatgccgattcccagttttttcaactccggcggccagtcgcgttttaattcttcgaaagctctttgcatttccaaagcggcccgaattgcccatagcgtttcattttcgacaaaaaatgtattttttacgttcctctcgatgtctttggaggaccctatgcagcgggatgtttcaagtaaacgcggaaaagacttcagataatacggtccgaacggaaaaggcggtgcgaaaaaagcgcgataaacaaaaggttgttgacgggcgcggcagggcgtaactgcggataatacgcattatctgaagttcgaacgcaatcataaacatcattatataaaggcatatttgagcatttgcgcggcagcgcgggaggcgttctgcggtgtcgtttcattcaaattgacataaattaattcttgtcaaacgcgcttgaaacggggcgtttccggcatggttttcagtcgttttttaaccccgaaaagggccgcaaaaggggcgtttttcgtttgtttttacaaacgcggttttaacaggttttttaacgtgttttaacgggattcacactggtttcaatagcgtttacaccgttgtgactgtcacggtgtgaaaagactgattcaggcgacagcgatggccgctttggcgttttggagagcgatttgggacatgaattaatttatgtcatacgaaacgactcatgcggaaatgggtcggtcgcgcgctttatgctgacaaatgaggcgcgcaacccgacagttattaatgacccgccttctgacagtaatggtttctgtaaaaacaatcaagctgtctgtgaaataaataagctttataataaagcctataatcgttagcggcttcttctatgcatactcgtgacgaaacgtttcaaaagttttccctttttcttccccgcaagaatctttcgctcatgccgcttccgcgcgcgtgagcggcgcgcctgcgctataatattcaacgcgggcggcgggcagccgcgcctcgcggggagacgccgggattatgaccaaagacaaattgttgttgattgacacgttcggccttatatacaggttctatcacaccatgcccaagatgaagacggcggagggaattcccaccggggcggtgttcggcatggcgcgcgcgctgctgaagatttttaaagataataagcccgactatctggtggtggcgatggagtccgagacacccactttcaggcatgccgaatatgccgcctacaaagctcacagggacagaatgccggacgagttgcgggaacagattccggccatcaacgagcttatctccgctttcggtataactccggccaagctcgacgggtacgaggcggacgatgtgatcggcactctggcgcgggcgggcgcggaacacggccttgaggtcgatattcttacaggcgatagagatatgttccagttggtgaacgacagcgtatcagtgctgatgtcgctgaaaggctcctcagagcttgagaagttcgaccgcgaggcggttaaagaaaaaatgggcgtttatccggaacgcatacccgacctcaaagggcttgaaggcgacagttcggacaacatccccggagtgccgggcgtcggccccaaaacagcggtgtctctgctcgaacaattcggagatatggacgccgtgttcgactctcttgaacagattgacaagaaagggctgcgggaaaaactggcggctaacagggaacttgcggaactgagcagaaggctcggcacgatagagaaacacgcgccgctcccatttgaaatcggcgcgtacaaactcccggcggtcgacaacgaaaagcttgcggcgttcttcgagaaatatgaaatgagaagtttcatatcggagcttggaatgaaagaggaggcggccgccccgccccgccccgccgccgttcagttcgactcggtttataaggctgtcttcgacgaagccgaagtcatcgaagcgcttgagcgcgccgcctcgcgcggcaggctttgcgtagacctcgaaaccgacgggctggacaccttcgccgaccccatagtgggcatcgctctggcttccgaggccggcgacgccatctacatccccattcgacacggctccaccgtgaaacgcggcggcggcgaccttttcggcggcggcgacggctcggacgatgaagacgactccgacccggacgctgaaaaacagatagacccggaccgcgcaatcgctttgttgaaaccgtatctggaaaaccctgacatagaaaaaatcggccacaacctcaaattcgacgcgcagatgcttcgcgcggctggcgtgtctcttgccaacatcgcttacgactcattcatcgccgcttaccttatagacccggacggccgcagatacgggctgaaaacggtcgcggcgaacctgctgggagcgggcctgaaaacatacgaggatatggtcggcaagggaaaatctcagaagaaattctctgaggtcaagataagggacgcggtggattacgcctgcgctgacgtggacgccgcgttgaggatcgagccggagctttcgaggcggctggccgcagacggcctcgaccgcgtgttcaggaaaatcgagatgccccttatcccggtattggccgagatggagtggaacggagtggctctggacgcgtccgcgctcgcggggatgtccgaagacttcgccgcaagagagcgggcgctgagcgcggcggtggcggagcttgccggggcggatgtcaacctgaattccccgaaacaggtggccgagttgctgttcgtaaaactcggcctcagaaaagtcaagaaagaatccaccgacatagccgtcctcgaacagcttaaatgcgaccacccggcggtcccgctgataataaagttccggcaggcgagcaagcttcgcggcacatacatagacgctctgcccgcgctgataaacccgcgcacgggcagagtccacacgagcttcaaccagacgctggccgcgtcaggcagattgtcaagcagcaaccctaacatgcagaacatcccggtgcgctccgaggatgggcgcgagatcaggcgcgcgttcatccccggctccaaaggcctcgcccttgtctccgccgactactcccagatcgagatacggctcctcgccgagatgtccggcgacccttccctgctcgaagcgttccgcaaccgggaagacattcacgcgtccgtcgccgctcaggtgttcggagtccccgtctcggaagtgacgcaggaccagcgcagatacgcgaagacaatcaacttcggcctcatatacgggatgcgcgagttcaggctttcacaggagcttggcatctcccggcagcaggccgccgacttcatagaaacttatttctcgcggttccccggcgttcgcgacttcatagagaaaacaaacgaaaaactcctcgaagacggtttcgcagagacgctgttcggacgccgccgccgcgtgccggaactgaggtcttccaaccggcaggagcgcgaagcgggattgcgcgcggctttcaacacccgcattcaaggctctgcggcggacattatgaaactcgccatgatcgacgttcacaagatgatactcgcgggcgagatggacgctaaaatgctccttcaggttcatgacgaaatcgtgcttgaaacgcctgccgaaaaagtggcggacacggcggagaaaacccgcagagcaatggaagcagcgggccgcgattggggcgctctatccgtcgaacttccggcagacgtcaaagccgggccgaactggctcgacatggaaacggtttatacatgttattagatgattctacccactaccaagtgtgccatgcgcaaaactttttcttttgcgcatgatgcttttcaccaaatag

SEQ ID NO: 949 - DNA, 157134 bp, Artificial Sequence
  Synthetic Oligonucleotide
  misc_feature (1)..(36286): n is a, c, g, or t
nnnnnnnnnnnnnnnnnnnnnnnnnnnnnnnnnnnnnnnnnnnnnnnnnnnnnnnnnnnnnnnnnnnnnnnnnnnnnnnnnnnnnnnnnnnnnnnnnnnnnnnnnnnnnnnnnnnnnnnnnnnnnnnnnnnnnnnnnnnnnnnnnnnnnnnnnnnnnnnnnnnnnnnnnnnnnnnnnnnnnnnnnnnnnnnnnnnnnnnnnnnnnnnnnnnnnnnnnnnnnnnnnnnnnnnnnnnnnnnnnnnnnnnnnnnnnnnnnnnnnnnnnnnnnnnnnnnnnnnnnnnnnnnnnnnnnnnnnnnnnnnnnnnnnnnnnnnnnnnnnnnnnnnnnnnnnnnnnnnnnnnnnnnnnnnnnnnnnnnnnnnnnnnnnnnnnnnnnnnnnnnnnnnnnnnnnnnnnnnnnnnnnnnnnnnnnnnnnnnnnnnnnnnnnnnnnnnnnnnnnnnnnnnnnnnnnnnnnnnnnnnnnnnnnnnnnnnnnnnnnnnnnnnnnnnnnnnnnnnnnnnnnnnnnnnnnnnnnnnnnnnnnnnnnnnnnnnnnnnnnnnnnnnnnnnnnnnnnnnnnnnnnnnnnnnnnnnnnnnnnnnnnnnnnnnnnnnnnnnnnnnnnnnnnnnnnnnnnnnnnnnnnnnnnnnnnnnnnnnnnnnnnnnnnnnnnnnnnnnnnnnnnnnnnnnnnnnnnnnnnnnnnnnnnnnnnnnnnnnnnnnnnnnnnnnnnnnnnnnnnnnnnnnnnnnnnnnnnnnnnnnnnnnnnnnnnnnnnnnnnnnnnnnnnnnnnnnnnnnnnnnnnnnnnnnnnnnnnnnnnnnnnnnnnnnnnnnnnnnnnnnnnnnnnnnnnnnnnnnnnnnnnnnnnnnnnnnnnnnnnnnnnnnnnnnnnnnnnnnnnnnnnnnnnnnnnnnnnnnnnnnnnnnnnnnnnnnnnnnnnnnnnnnnnnnnnnnnnnnnnnnnnnnnnnnnnnnnnnnnnnnnnnnnnnnnnnnnnnnnnnnnnnnnnnnnnnnnnnnnnnnnnnnnnnnnnnnnnnnnnnnnnnnnnnnnnnnnnnnnnnnnnnnnnnnnnnnnnnnnnnnnnnnnnnnnnnnnnnnnnnnnnnnnnnnnnnnnnnnnnnnnnnnnnnnnnnnnnnnnnnnnnnnnnnnnnnnnnnnnnnnnnnnnnnnnnnnnnnnnnnnnnnnnnnnnnnnnnnnnnnnnnnnnnnnnnnnnnnnnnnnnnnnnnnnnnnnnnnnnnnnnnnnnnnnnnnnnnnnnnnnnnnnnnnnnnnnnnnnnnnnnnnnnnnnnnnnnnnnnnnnnnnnnnnnnnnnnnnnnnnnnnnnnnnnnnnnnnnnnnnnnnnnnnnnnnnnnnnnnnnnnnnnnnnnnnnnnnnnnnnnnnnnnnnnnnnnnnnnnnnnnnnnnnnnnnnnnnnnnnnnnnnnnnnnnnnnnnnnnnnnnnnnnnnnnnnnnnnnnnnnnnnnnnnnnnnnnnnnnnnnnnnnnnnnnnnnnnnnnnnnnnnnnnnnnnnnnnnnnnnnnnnnnnnnnnnnnnnnnnnnnnnnnnnnnnnnnnnnnnnnnnnnnnnnnnnnnnnnnnnnnnnnnnnnnnnnnnnnnnnnnnnnnnnnnnnnnnnnnnnnnnnnnnnnnnnnnnnnnnnnnnnnnnnnnnnnnnnnnnnnnnnnnnnnnnnnnnnnnnnnnnnnnnnnnnnnnnnnnnnnnnnnnnnnnnnnnnnnnnnnnnnnnnnnnnnnnnnnnnnnnnnnnnnnnnnnnnnnnnnnnnnnnnnnnnnnnnnnnnnnnnnnnnnnnnnnnnnnnnnnnnnnnnnnnnnnnnnnnnnnnnnnnnnnnnnnnnnnnnnnnnnnnnnnnnnnnnnnnnnnnnnnnnnnnnnnnnnnnnnnnnnnnnnnnnnnnnnnnnnnnnnnnnnnnnnnnnnnnnnnnnnnnnnnnnnnnnnnnnnnnnnnnnnnnnnnnnnnnnnnnnnnnnnnnnnnnnnnnnnnnnnnnnnnnnnnnnnnnnnnnnnnnnnnnnnnnnnnnnnnnnnnnnnnnnnnnnnnnnnnnnnnnnnnnnnnnnnnnnnnnnnnnnnnnnnnnnnnnnnnnnnnnnnnnnnnnnnnnnnnnnnnnnnnnnnnnnnnnnnnnnnnnnnnnnnnnnnnnnnnnnnnnnnnnnnnnnnnnnnnnnnnnnnnnnnnnnnnnnnnnnnnnnnnnnnnnnnnnnnnnnnnnnnnnnnnnnnnnnnnnnnnnnnnnnnnnnnnnnnnnnnnnnnnnnnnnnnnnnnnnnnnnnnnnnnnnnnnnnnnnnnnnnnnnnnnnnnnnnnnnnnnnnnnnnnnnnnnnnnnnnnnnnnnnnnnnnnnnnnnnnnnnnnnnnnnnnnnnnnnnnnnnnnnnnnnnnnnnnnnnnnnnnnnnnnnnnnnnnnnnnnnnnnnnnnnnnnnnnnnnnnnnnnnnnnnnnnnnnnnnnnnnnnnnnnnnnnnnnnnnnnnnnnnnnnnnnnnnnnnnnnnnnnnnnnnnnnnnnnnnnnnnnnnnnnnnnnnnnnnnnnnnnnnnnnnnnnnnnnnnnnnnnnnnnnnnnnnnnnnnnnnnnnnnnnnnnnnnnnnnnnnnnnnnnnnnnnnnnnnnnnnnnnnnnnnnnnnnnnnnnnnnnnnnnnnnnnnnnnnnnnnnnnnnnnnnnnnnnnnnnnnnnnnnnnnnnnnnnnnnnnnnnnnnnnnnnnnnnnnnnnnnnnnnnnnnnnnnnnnnnnnnnnnnnnnnnnnnnnnnnnnnnnnnnnnnnnnnnnnnnnnnnnnnnnnnnnnnnnnnnnnnnnnnnnnnnnnnnnnnnnnnnnnnnnnnnnnnnnnnnnnnnnnnnnnnnnnnnnnnnnnnnnnnnnnnnnnnnnnnnnnnnnnnnnnnnnnnnnnnnnnnnnnnnnnnnnnnnnnnnnnnnnnnnnnnnnnnnnnnnnnnnnnnnnnnnnnnnnnnnnnnnnnnnnnnnnnnnnnnnnnnnnnnnnnnnnnnnnnnnnnnnnnnnnnnnnnnnnnnnnnnnnnnnnnnnnnnnnnnnnnnnnnnnnnnnnnnnnnnnnnnnnnnnnnnnnnnnnnnnnnnnnnnnnnnnnnnnnnnnnnnnnnnnnnnnnnnnnnnnnnnnnnnnnnnnnnnnnnnnnnnnnnnnnnnnnnnnnnnnnnnnnnnnnnnnnnnnnnnnnnnnnnnnnnnnnnnnnnnnnnnnnnnnnnnnnnnnnnnnnnnnnnnnnnnnnnnnnnnnnnnnnnnnnnnnnnnnnnnnnnnnnnnnnnnnnnnnnnnnnnnnnnnnnnnnnnnnnnnnnnnnnnnnnnnnnnnnnnnnnnnnnnnnnnnnnnnnnnnnnnnnnnnnnnnnnnnnnnnnnnnnnnnnnnnnnnnnnnnnnnnnnnnnnnnnnnnnnnnnnnnnnnnnnnnnnnnnnnnnnnnnnnnnnnnnnnnnnnnnnnnnnnnnnnnnnnnnnnnnnnnnnnnnnnnnnnnnnnnnnnnnnnnnnnnnnnnnnnnnnnnnnnnnnnnnnnnnnnnnnnnnnnnnnnnnnnnnnnnnnnnnnnnnnnnnnnnnnnnnnnnnnnnnnnnnnnnnnnnnnnnnnnnnnnnnnnnnnnnnnnnnnnnnnnnnnnnnnnnnnnnnnnnnnnnnnnnnnnnnnnnnnnnnnnnnnnnnnnnnnnnnnnnnnnnnnnnnnnnnnnnnnnnnnnnnnnnnnnnnnnnnnnnnnnnnnnnnnnnnnnnnnnnnnnnnnnnnnnnnnnnnnnnnnnnnnnnnnnnnnnnnnnnnnnnnnnnnnnnnnnnnnnnnnnnnnnnnnnnnnnnnnnnnnnnnnnnnnnnnnnnnnnnnnnnnnnnnnnnnnnnnnnnnnnnnnnnnnnnnnnnnnnnnnnnnnnnnnnnnnnnnnnnnnnnnnnnnnnnnnnnnnnnnnnnnnnnnnnnnnnnnnnnnnnnnnnnnnnnnnnnnnnnnnnnnnnnnnnnnnnnnnnnnnnnnnnnnnnnnnnnnnnnnnnnnnnnnnnnnnnnnnnnnnnnnnnnnnnnnnnnnnnnnnnnnnnnnnnnnnnnnnnnnnnnnnnnnnnnnnnnnnnnnnnnnnnnnnnnnnnnnnnnnnnnnnnnnnnnnnnnnnnnnnnnnnnnnnnnnnnnnnnnnnnnnnnnnnnnnnnnnnnnnnnnnnnnnnnnnnnnnnnnnnnnnnnnnnnnnnnnnnnnnnnnnnnnnnnnnnnnnnnnnnnnnnnnnnnnnnnnnnnnnnnnnnnnnnnnnnnnnnnnnnnnnnnnnnnnnnnnnnnnnnnnnnnnnnnnnnnnnnnnnnnnnnnnnnnnnnnnnnnnnnnnnnnnnnnnnnnnnnnnnnnnnnnnnnnnnnnnnnnnnnnnnnnnnnnnnnnnnnnnnnnnnnnnnnnnnnnnnnnnnnnnnnnnnnnnnnnnnnnnnnnnnnnnnnnnnnnnnnnnnnnnnnnnnnnnnnnnnnnnnnnnnnnnnnnnnnnnnnnnnnnnnnnnnnnnnnnnnnnnnnnnnnnnnnnnnnnnnnnnnnnnnnnnnnnnnnnnnnnnnnnnnnnnnnnnnnnnnnnnnnnnnnnnnnnnnnnnnnnnnnnnnnnnnnnnnnnnnnnnnnnnnnnnnnnnnnnnnnnnnnnnnnnnnnnnnnnnnnnnnnnnnnnnnnnnnnnnnnnnnnnnnnnnnnnnnnnnnnnnnnnnnnnnnnnnnnnnnnnnnnnnnnnnnnnnnnnnnnnnnnnnnnnnnnnnnnnnnnnnnnnnnnnnnnnnnnnnnnnnnnnnnnnnnnnnnnnnnnnnnnnnnnnnnnnnnnnnnnnnnnnnnnnnnnnnnnnnnnnnnnnnnnnnnnnnnnnnnnnnnnnnnnnnnnnnnnnnnnnnnnnnnnnnnnnnnnnnnnnnnnnnnnnnnnnnnnnnnnnnnnnnnnnnnnnnnnnnnnnnnnnnnnnnnnnnnnnnnnnnnnnnnnnnnnnnnnnnnnnnnnnnnnnnnnnnnnnnnnnnnnnnnnnnnnnnnnnnnnnnnnnnnnnnnnnnnnnnnnnnnnnnnnnnnnnnnnnnnnnnnnnnnnnnnnnnnnnnnnnnnnnnnnnnnnnnnnnnnnnnnnnnnnnnnnnnnnnnnnnnnnnnnnnnnnnnnnnnnnnnnnnnnnnnnnnnnnnnnnnnnnnnnnnnnnnnnnnnnnnnnnnnnnnnnnnnnnnnnnnnnnnnnnnnnnnnnnnnnnnnnnnnnnnnnnnnnnnnnnnnnnnnnnnnnnnnnnnnnnnnnnnnnnnnnnnnnnnnnnnnnnnnnnnnnnnnnnnnnnnnnnnnnnnnnnnnnnnnnnnnnnnnnnnnnnnnnnnnnnnnnnnnnnnnnnnnnnnnnnnnnnnnnnnnnnnnnnnnnnnnnnnnnnnnnnnnnnnnnnnnnnnnnnnnnnnnnnnnnnnnnnnnnnnnnnnnnnnnnnnnnnnnnnnnnnnnnnnnnnnnnnnnnnnnnnnnnnnnnnnnnnnnnnnnnnnnnnnnnnnnnnnnnnnnnnnnnnnnnnnnnnnnnnnnnnnnnnnnnnnnnnnnnnnnnnnnnnnnnnnnnnnnnnnnnnnnnnnnnnnnnnnnnnnnnnnnnnnnnnnnnnnnnnnnnnnnnnnnnnnnnnnnnnnnnnnnnnnnnnnnnnnnnnnnnnnnnnnnnnnnnnnnnnnnnnnnnnnnnnnnnnnnnnnnnnnnnnnnnnnnnnnnnnnnnnnnnnnnnnnnnnnnnnnnnnnnnnnnnnnnnnnnnnnnnnnnnnnnnnnnnnnnnnnnnnnnnnnnnnnnnnnnnnnnnnnnnnnnnnnnnnnnnnnnnnnnnnnnnnnnnnnnnnnnnnnnnnnnnnnnnnnnnnnnnnnnnnnnnnnnnnnnnnnnnnnnnnnnnnnnnnnnnnnnnnnnnnnnnnnnnnnnnnnnnnnnnnnnnnnnnnnnnnnnnnnnnnnnnnnnnnnnnnnnnnnnnnnnnnnnnnnnnnnnnnnnnnnnnnnnnnnnnnnnnnnnnnnnnnnnnnnnnnnnnnnnnnnnnnnnnnnnnnnnnnnnnnnnnnnnnnnnnnnnnnnnnnnnnnnnnnnnnnnnnnnnnnnnnnnnnnnnnnnnnnnnnnnnnnnnnnnnnnnnnnnnnnnnnnnnnnnnnnnnnnnnnnnnnnnnnnnnnnnnnnnnnnnnnnnnnnnnnnnnnnnnnnnnnnnnnnnnnnnnnnnnnnnnnnnnnnnnnnnnnnnnnnnnnnnnnnnnnnnnnnnnnnnnnnnnnnnnnnnnnnnnnnnnnnnnnnnnnnnnnnnnnnnnnnnnnnnnnnnnnnnnnnnnnnnnnnnnnnnnnnnnnnnnnnnnnnnnnnnnnnnnnnnnnnnnnnnnnnnnnnnnnnnnnnnnnnnnnnnnnnnnnnnnnnnnnnnnnnnnnnnnnnnnnnnnnnnnnnnnnnnnnnnnnnnnnnnnnnnnnnnnnnnnnnnnnnnnnnnnnnnnnnnnnnnnnnnnnnnnnnnnnnnnnnnnnnnnnnnnnnnnnnnnnnnnnnnnnnnnnnnnnnnnnnnnnnnnnnnnnnnnnnnnnnnnnnnnnnnnnnnnnnnnnnnnnnnnnnnnnnnnnnnnnnnnnnnnnnnnnnnnnnnnnnnnnnnnnnnnnnnnnnnnnnnnnnnnnnnnnnnnnnnnnnnnnnnnnnnnnnnnnnnnnnnnnnnnnnnnnnnnnnnnnnnnnnnnnnnnnnnnnnnnnnnnnnnnnnnnnnnnnnnnnnnnnnnnnnnnnnnnnnnnnnnnnnnnnnnnnnnnnnnnnnnnnnnnnnnnnnnnnnnnnnnnnnnnnnnnnnnnnnnnnnnnnnnnnnnnnnnnnnnnnnnnnnnnnnnnnnnnnnnnnnnnnnnnnnnnnnnnnnnnnnnnnnnnnnnnnnnnnnnnnnnnnnnnnnnnnnnnnnnnnnnnnnnnnnnnnnnnnnnnnnnnnnnnnnnnnnnnnnnnnnnnnnnnnnnnnnnnnnnnnnnnnnnnnnnnnnnnnnnnnnnnnnnnnnnnnnnnnnnnnnnnnnnnnnnnnnnnnnnnnnnnnnnnnnnnnnnnnnnnnnnnnnnnnnnnnnnnnnnnnnnnnnnnnnnnnnnnnnnnnnnnnnnnnnnnnnnnnnnnnnnnnnnnnnnnnnnnnnnnnnnnnnnnnnnnnnnnnnnnnnnnnnnnnnnnnnnnnnnnnnnnnnnnnnnnnnnnnnnnnnnnnnnnnnnnnnnnnnnnnnnnnnnnnnnnnnnnnnnnnnnnnnnnnnnnnnnnnnnnnnnnnnnnnnnnnnnnnnnnnnnnnnnnnnnnnnnnnnnnnnnnnnnnnnnnnnnnnnnnnnnnnnnnnnnnnnnnnnnnnnnnnnnnnnnnnnnnnnnnnnnnnnnnnnnnnnnnnnnnnnnnnnnnnnnnnnnnnnnnnnnnnnnnnnnnnnnnnnnnnnnnnnnnnnnnnnnnnnnnnnnnnnnnnnnnnnnnnnnnnnnnnnnnnnnnnnnnnnnnnnnnnnnnnnnnnnnnnnnnnnnnnnnnnnnnnnnnnnnnnnnnnnnnnnnnnnnnnnnnnnnnnnnnnnnnnnnnnnnnnnnnnnnnnnnnnnnnnnnnnnnnnnnnnnnnnnnnnnnnnnnnnnnnnnnnnnnnnnnnnnnnnnnnnnnnnnnnnnnnnnnnnnnnnnnnnnnnnnnnnnnnnnnnnnnnnnnnnnnnnnnnnnnnnnnnnnnnnnnnnnnnnnnnnnnnnnnnnnnnnnnnnnnnnnnnnnnnnnnnnnnnnnnnnnnnnnnnnnnnnnnnnnnnnnnnnnnnnnnnnnnnnnnnnnnnnnnnnnnnnnnnnnnnnnnnnnnnnnnnnnnnnnnnnnnnnnnnnnnnnnnnnnnnnnnnnnnnnnnnnnnnnnnnnnnnnnnnnnnnnnnnnnnnnnnnnnnnnnnnnnnnnnnnnnnnnnnnnnnnnnnnnnnnnnnnnnnnnnnnnnnnnnnnnnnnnnnnnnnnnnnnnnnnnnnnnnnnnnnnnnnnnnnnnnnnnnnnnnnnnnnnnnnnnnnnnnnnnnnnnnnnnnnnnnnnnnnnnnnnnnnnnnnnnnnnnnnnnnnnnnnnnnnnnnnnnnnnnnnnnnnnnnnnnnnnnnnnnnnnnnnnnnnnnnnnnnnnnnnnnnnnnnnnnnnnnnnnnnnnnnnnnnnnnnnnnnnnnnnnnnnnnnnnnnnnnnnnnnnnnnnnnnnnnnnnnnnnnnnnnnnnnnnnnnnnnnnnnnnnnnnnnnnnnnnnnnnnnnnnnnnnnnnnnnnnnnnnnnnnnnnnnnnnnnnnnnnnnnnnnnnnnnnnnnnnnnnnnnnnnnnnnnnnnnnnnnnnnnnnnnnnnnnnnnnnnnnnnnnnnnnnnnnnnnnnnnnnnnnnnnnnnnnnnnnnnnnnnnnnnnnnnnnnnnnnnnnnnnnnnnnnnnnnnnnnnnnnnnnnnnnnnnnnnnnnnnnnnnnnnnnnnnnnnnnnnnnnnnnnnnnnnnnnnnnnnnnnnnnnnnnnnnnnnnnnnnnnnnnnnnnnnnnnnnnnnnnnnnnnnnnnnnnnnnnnnnnnnnnnnnnnnnnnnnnnnnnnnnnnnnnnnnnnnnnnnnnnnnnnnnnnnnnnnnnnnnnnnnnnnnnnnnnnnnnnnnnnnnnnnnnnnnnnnnnnnnnnnnnnnnnnnnnnnnnnnnnnnnnnnnnnnnnnnnnnnnnnnnnnnnnnnnnnnnnnnnnnnnnnnnnnnnnnnnnnnnnnnnnnnnnnnnnnnnnnnnnnnnnnnnnnnnnnnnnnnnnnnnnnnnnnnnnnnnnnnnnnnnnnnnnnnnnnnnnnnnnnnnnnnnnnnnnnnnnnnnnnnnnnnnnnnnnnnnnnnnnnnnnnnnnnnnnnnnnnnnnnnnnnnnnnnnnnnnnnnnnnnnnnnnnnnnnnnnnnnnnnnnnnnnnnnnnnnnnnnnnnnnnnnnnnnnnnnnnnnnnnnnnnnnnnnnnnnnnnnnnnnnnnnnnnnnnnnnnnnnnnnnnnnnnnnnnnnnnnnnnnnnnnnnnnnnnnnnnnnnnnnnnnnnnnnnnnnnnnnnnnnnnnnnnnnnnnnnnnnnnnnnnnnnnnnnnnnnnnnnnnnnnnnnnnnnnnnnnnnnnnnnnnnnnnnnnnnnnnnnnnnnnnnnnnnnnnnnnnnnnnnnnnnnnnnnnnnnnnnnnnnnnnnnnnnnnnnnnnnnnnnnnnnnnnnnnnnnnnnnnnnnnnnnnnnnnnnnnnnnnnnnnnnnnnnnnnnnnnnnnnnnnnnnnnnnnnnnnnnnnnnnnnnnnnnnnnnnnnnnnnnnnnnnnnnnnnnnnnnnnnnnnnnnnnnnnnnnnnnnnnnnnnnnnnnnnnnnnnnnnnnnnnnnnnnnnnnnnnnnnnnnnnnnnnnnnnnnnnnnnnnnnnnnnnnnnnnnnnnnnnnnnnnnnnnnnnnnnnnnnnnnnnnnnnnnnnnnnnnnnnnnnnnnnnnnnnnnnnnnnnnnnnnnnnnnnnnnnnnnnnnnnnnnnnnnnnnnnnnnnnnnnnnnnnnnnnnnnnnnnnnnnnnnnnnnnnnnnnnnnnnnnnnnnnnnnnnnnnnnnnnnnnnnnnnnnnnnnnnnnnnnnnnnnnnnnnnnnnnnnnnnnnnnnnnnnnnnnnnnnnnnnnnnnnnnnnnnnnnnnnnnnnnnnnnnnnnnnnnnnnnnnnnnnnnnnnnnnnnnnnnnnnnnnnnnnnnnnnnnnnnnnnnnnnnnnnnnnnnnnnnnnnnnnnnnnnnnnnnnnnnnnnnnnnnnnnnnnnnnnnnnnnnnnnnnnnnnnnnnnnnnnnnnnnnnnnnnnnnnnnnnnnnnnnnnnnnnnnnnnnnnnnnnnnnnnnnnnnnnnnnnnnnnnnnnnnnnnnnnnnnnnnnnnnnnnnnnnnnnnnnnnnnnnnnnnnnnnnnnnnnnnnnnnnnnnnnnnnnnnnnnnnnnnnnnnnnnnnnnnnnnnnnnnnnnnnnnnnnnnnnnnnnnnnnnnnnnnnnnnnnnnnnnnnnnnnnnnnnnnnnnnnnnnnnnnnnnnnnnnnnnnnnnnnnnnnnnnnnnnnnnnnnnnnnnnnnnnnnnnnnnnnnnnnnnnnnnnnnnnnnnnnnnnnnnnnnnnnnnnnnnnnnnnnnnnnnnnnnnnnnnnnnnnnnnnnnnnnnnnnnnnnnnnnnnnnnnnnnnnnnnnnnnnnnnnnnnnnnnnnnnnnnnnnnnnnnnnnnnnnnnnnnnnnnnnnnnnnnnnnnnnnnnnnnnnnnnnnnnnnnnnnnnnnnnnnnnnnnnnnnnnnnnnnnnnnnnnnnnnnnnnnnnnnnnnnnnnnnnnnnnnnnnnnnnnnnnnnnnnnnnnnnnnnnnnnnnnnnnnnnnnnnnnnnnnnnnnnnnnnnnnnnnnnnnnnnnnnnnnnnnnnnnnnnnnnnnnnnnnnnnnnnnnnnnnnnnnnnnnnnnnnnnnnnnnnnnnnnnnnnnnnnnnnnnnnnnnnnnnnnnnnnnnnnnnnnnnnnnnnnnnnnnnnnnnnnnnnnnnnnnnnnnnnnnnnnnnnnnnnnnnnnnnnnnnnnnnnnnnnnnnnnnnnnnnnnnnnnnnnnnnnnnnnnnnnnnnnnnnnnnnnnnnnnnnnnnnnnnnnnnnnnnnnnnnnnnnnnnnnnnnnnnnnnnnnnnnnnnnnnnnnnnnnnnnnnnnnnnnnnnnnnnnnnnnnnnnnnnnnnnnnnnnnnnnnnnnnnnnnnnnnnnnnnnnnnnnnnnnnnnnnnnnnnnnnnnnnnnnnnnnnnnnnnnnnnnnnnnnnnnnnnnnnnnnnnnnnnnnnnnnnnnnnnnnnnnnnnnnnnnnnnnnnnnnnnnnnnnnnnnnnnnnnnnnnnnnnnnnnnnnnnnnnnnnnnnnnnnnnnnnnnnnnnnnnnnnnnnnnnnnnnnnnnnnnnnnnnnnnnnnnnnnnnnnnnnnnnnnnnnnnnnnnnnnnnnnnnnnnnnnnnnnnnnnnnnnnnnnnnnnnnnnnnnnnnnnnnnnnnnnnnnnnnnnnnnnnnnnnnnnnnnnnnnnnnnnnnnnnnnnnnnnnnnnnnnnnnnnnnnnnnnnnnnnnnnnnnnnnnnnnnnnnnnnnnnnnnnnnnnnnnnnnnnnnnnnnnnnnnnnnnnnnnnnnnnnnnnnnnnnnnnnnnnnnnnnnnnnnnnnnnnnnnnnnnnnnnnnnnnnnnnnnnnnnnnnnnnnnnnnnnnnnnnnnnnnnnnnnnnnnnnnnnnnnnnnnnnnnnnnnnnnnnnnnnnnnnnnnnnnnnnnnnnnnnnnnnnnnnnnnnnnnnnnnnnnnnnnnnnnnnnnnnnnnnnnnnnnnnnnnnnnnnnnnnnnnnnnnnnnnnnnnnnnnnnnnnnnnnnnnnnnnnnnnnnnnnnnnnnnnnnnnnnnnnnnnnnnnnnnnnnnnnnnnnnnnnnnnnnnnnnnnnnnnnnnnnnnnnnnnnnnnnnnnnnnnnnnnnnnnnnnnnnnnnnnnnnnnnnnnnnnnnnnnnnnnnnnnnnnnnnnnnnnnnnnnnnnnnnnnnnnnnnnnnnnnnnnnnnnnnnnnnnnnnnnnnnnnnnnnnnnnnnnnnnnnnnnnnnnnnnnnnnnnnnnnnnnnnnnnnnnnnnnnnnnnnnnnnnnnnnnnnnnnnnnnnnnnnnnnnnnnnnnnnnnnnnnnnnnnnnnnnnnnnnnnnnnnnnnnnnnnnnnnnnnnnnnnnnnnnnnnnnnnnnnnnnnnnnnnnnnnnnnnnnnnnnnnnnnnnnnnnnnnnnnnnnnnnnnnnnnnnnnnnnnnnnnnnnnnnnnnnnnnnnnnnnnnnnnnnnnnnnnnnnnnnnnnnnnnnnnnnnnnnnnnnnnnnnnnnnnnnnnnnnnnnnnnnnnnnnnnnnnnnnnnnnnnnnnnnnnnnnnnnnnnnnnnnnnnnnnnnnnnnnnnnnnnnnnnnnnnnnnnnnnnnnnnnnnnnnnnnnnnnnnnnnnnnnnnnnnnnnnnnnnnnnnnnnnnnnnnnnnnnnnnnnnnnnnnnnnnnnnnnnnnnnnnnnnnnnnnnnnnnnnnnnnnnnnnnnnnnnnnnnnnnnnnnnnnnnnnnnnnnnnnnnnnnnnnnnnnnnnnnnnnnnnnnnnnnnnnnnnnnnnnnnnnnnnnnnnnnnnnnnnnnnnnnnnnnnnnnnnnnnnnnnnnnnnnnnnnnnnnnnnnnnnnnnnnnnnnnnnnnnnnnnnnnnnnnnnnnnnnnnnnnnnnnnnnnnnnnnnnnnnnnnnnnnnnnnnnnnnnnnnnnnnnnnnnnnnnnnnnnnnnnnnnnnnnnnnnnnnnnnnnnnnnnnnnnnnnnnnnnnnnnnnnnnnnnnnnnnnnnnnnnnnnnnnnnnnnnnnnnnnnnnnnnnnnnnnnnnnnnnnnnnnnnnnnnnnnnnnnnnnnnnnnnnnnnnnnnnnnnnnnnnnnnnnnnnnnnnnnnnnnnnnnnnnnnnnnnnnnnnnnnnnnnnnnnnnnnnnnnnnnnnnnnnnnnnnnnnnnnnnnnnnnnnnnnnnnnnnnnnnnnnnnnnnnnnnnnnnnnnnnnnnnnnnnnnnnnnnnnnnnnnnnnnnnnnnnnnnnnnnnnnnnnnnnnnnnnnnnnnnnnnnnnnnnnnnnnnnnnnnnnnnnnnnnnnnnnnnnnnnnnnnnnnnnnnnnnnnnnnnnnnnnnnnnnnnnnnnnnnnnnnnnnnnnnnnnnnnnnnnnnnnnnnnnnnnnnnnnnnnnnnnnnnnnnnnnnnnnnnnnnnnnnnnnnnnnnnnnnnnnnnnnnnnnnnnnnnnnnnnnnnnnnnnnnnnnnnnnnnnnnnnnnnnnnnnnnnnnnnnnnnnnnnnnnnnnnnnnnnnnnnnnnnnnnnnnnnnnnnnnnnnnnnnnnnnnnnnnnnnnnnnnnnnnnnnnnnnnnnnnnnnnnnnnnnnnnnnnnnnnnnnnnnnnnnnnnnnnnnnnnnnnnnnnnnnnnnnnnnnnnnnnnnnnnnnnnnnnnnnnnnnnnnnnnnnnnnnnnnnnnnnnnnnnnnnnnnnnnnnnnnnnnnnnnnnnnnnnnnnnnnnnnnnnnnnnnnnnnnnnnnnnnnnnnnnnnnnnnnnnnnnnnnnnnnnnnnnnnnnnnnnnnnnnnnnnnnnnnnnnnnnnnnnnnnnnnnnnnnnnnnnnnnnnnnnnnnnnnnnnnnnnnnnnnnnnnnnnnnnnnnnnnnnnnnnnnnnnnnnnnnnnnnnnnnnnnnnnnnnnnnnnnnnnnnnnnnnnnnnnnnnnnnnnnnnnnnnnnnnnnnnnnnnnnnnnnnnnnnnnnnnnnnnnnnnnnnnnnnnnnnnnnnnnnnnnnnnnnnnnnnnnnnnnnnnnnnnnnnnnnnnnnnnnnnnnnnnnnnnnnnnnnnnnnnnnnnnnnnnnnnnnnnnnnnnnnnnnnnnnnnnnnnnnnnnnnnnnnnnnnnnnnnnnnnnnnnnnnnnnnnnnnnnnnnnnnnnnnnnnnnnnnnnnnnnnnnnnnnnnnnnnnnnnnnnnnnnnnnnnnnnnnnnnnnnnnnnnnnnnnnnnnnnnnnnnnnnnnnnnnnnnnnnnnnnnnnnnnnnnnnnnnnnnnnnnnnnnnnnnnnnnnnnnnnnnnnnnnnnnnnnnnnnnnnnnnnnnnnnnnnnnnnnnnnnnnnnnnnnnnnnnnnnnnnnnnnnnnnnnnnnnnnnnnnnnnnnnnnnnnnnnnnnnnnnnnnnnnnnnnnnnnnnnnnnnnnnnnnnnnnnnnnnnnnnnnnnnnnnnnnnnnnnnnnnnnnnnnnnnnnnnnnnnnnnnnnnnnnnnnnnnnnnnnnnnnnnnnnnnnnnnnnnnnnnnnnnnnnnnnnnnnnnnnnnnnnnnnnnnnnnnnnnnnnnnnnnnnnnnnnnnnnnnnnnnnnnnnnnnnnnnnnnnnnnnnnnnnnnnnnnnnnnnnnnnnnnnnnnnnnnnnnnnnnnnnnnnnnnnnnnnnnnnnnnnnnnnnnnnnnnnnnnnnnnnnnnnnnnnnnnnnnnnnnnnnnnnnnnnnnnnnnnnnnnnnnnnnnnnnnnnnnnnnnnnnnnnnnnnnnnnnnnnnnnnnnnnnnnnnnnnnnnnnnnnnnnnnnnnnnnnnnnnnnnnnnnnnnnnnnnnnnnnnnnnnnnnnnnnnnnnnnnnnnnnnnnnnnnnnnnnnnnnnnnnnnnnnnnnnnnnnnnnnnnnnnnnnnnnnnnnnnnnnnnnnnnnnnnnnnnnnnnnnnnnnnnnnnnnnnnnnnnnnnnnnnnnnnnnnnnnnnnnnnnnnnnnnnnnnnnnnnnnnnnnnnnnnnnnnnnnnnnnnnnnnnnnnnnnnnnnnnnnnnnnnnnnnnnnnnnnnnnnnnnnnnnnnnnnnnnnnnnnnnnnnnnnnnnnnnnnnnnnnnnnnnnnnnnnnnnnnnnnnnnnnnnnnnnnnnnnnnnnnnnnnnnnnnnnnnnnnnnnnnnnnnnnnnnnnnnnnnnnnnnnnnnnnnnnnnnnnnnnnnnnnnnnnnnnnnnnnnnnnnnnnnnnnnnnnnnnnnnnnnnnnnnnnnnnnnnnnnnnnnnnnnnnnnnnnnnnnnnnnnnnnnnnnnnnnnnnnnnnnnnnnnnnnnnnnnnnnnnnnnnnnnnnnnnnnnnnnnnnnnnnnnnnnnnnnnnnnnnnnnnnnnnnnnnnnnnnnnnnnnnnnnnnnnnnnnnnnnnnnnnnnnnnnnnnnnnnnnnnnnnnnnnnnnnnnnnnnnnnnnnnnnnnnnnnnnnnnnnnnnnnnnnnnnnnnnnnnnnnnnnnnnnnnnnnnnnnnnnnnnnnnnnnnnnnnnnnnnnnnnnnnnnnnnnnnnnnnnnnnnnnnnnnnnnnnnnnnnnnnnnnnnnnnnnnnnnnnnnnnnnnnnnnnnnnnnnnnnnnnnnnnnnnnnnnnnnnnnnnnnnnnnnnnnnnnnnnnnnnnnnnnnnnnnnnnnnnnnnnnnnnnnnnnnnnnnnnnnnnnnnnnnnnnnnnnnnnnnnnnnnnnnnnnnnnnnnnnnnnnnnnnnnnnnnnnnnnnnnnnnnnnnnnnnnnnnnnnnnnnnnnnnnnnnnnnnnnnnnnnnnnnnnnnnnnnnnnnnnnnnnnnnnnnnnnnnnnnnnnnnnnnnnnnnnnnnnnnnnnnnnnnnnnnnnnnnnnnnnnnnnnnnnnnnnnnnnnnnnnnnnnnnnnnnnnnnnnnnnnnnnnnnnnnnnnnnnnnnnnnnnnnnnnnnnnnnnnnnnnnnnnnnnnnnnnnnnnnnnnnnnnnnnnnnnnnnnnnnnnnnnnnnnnnnnnnnnnnnnnnnnnnnnnnnnnnnnnnnnnnnnnnnnnnnnnnnnnnnnnnnnnnnnnnnnnnnnnnnnnnnnnnnnnnnnnnnnnnnnnnnnnnnnnnnnnnnnnnnnnnnnnnnnnnnnnnnnnnnnnnnnnnnnnnnnnnnnnnnnnnnnnnnnnnnnnnnnnnnnnnnnnnnnnnnnnnnnnnnnnnnnnnnnnnnnnnnnnnnnnnnnnnnnnnnnnnnnnnnnnnnnnnnnnnnnnnnnnnnnnnnnnnnnnnnnnnnnnnnnnnnnnnnnnnnnnnnnnnnnnnnnnnnnnnnnnnnnnnnnnnnnnnnnnnnnnnnnnnnnnnnnnnnnnnnnnnnnnnnnnnnnnnnnnnnnnnnnnnnnnnnnnnnnnnnnnnnnnnnnnnnnnnnnnnnnnnnnnnnnnnnnnnnnnnnnnnnnnnnnnnnnnnnnnnnnnnnnnnnnnnnnnnnnnnnnnnnnnnnnnnnnnnnnnnnnnnnnnnnnnnnnnnnnnnnnnnnnnnnnnnnnnnnnnnnnnnnnnnnnnnnnnnnnnnnnnnnnnnnnnnnnnnnnnnnnnnnnnnnnnnnnnnnnnnnnnnnnnnnnnnnnnnnnnnnnnnnnnnnnnnnnnnnnnnnnnnnnnnnnnnnnnnnnnnnnnnnnnnnnnnnnnnnnnnnnnnnnnnnnnnnnnnnnnnnnnnnnnnnnnnnnnnnnnnnnnnnnnnnnnnnnnnnnnnnnnnnnnnnnnnnnnnnnnnnnnnnnnnnnnnnnnnnnnnnnnnnnnnnnnnnnnnnnnnnnnnnnnnnnnnnnnnnnnnnnnnnnnnnnnnnnnnnnnnnnnnnnnnnnnnnnnnnnnnnnnnnnnnnnnnnnnnnnnnnnnnnnnnnnnnnnnnnnnnnnnnnnnnnnnnnnnnnnnnnnnnnnnnnnnnnnnnnnnnnnnnnnnnnnnnnnnnnnnnnnnnnnnnnnnnnnnnnnnnnnnnnnnnnnnnnnnnnnnnnnnnnnnnnnnnnnnnnnnnnnnnnnnnnnnnnnnnnnnnnnnnnnnnnnnnnnnnnnnnnnnnnnnnnnnnnnnnnnnnnnnnnnnnnnnnnnnnnnnnnnnnnnnnnnnnnnnnnnnnnnnnnnnnnnnnnnnnnnnnnnnnnnnnnnnnnnnnnnnnnnnnnnnnnnnnnnnnnnnnnnnnnnnnnnnnnnnnnnnnnnnnnnnnnnnnnnnnnnnnnnnnnnnnnnnnnnnnnnnnnnnnnnnnnnnnnnnnnnnnnnnnnnnnnnnnnnnnnnnnnnnnnnnnnnnnnnnnnnnnnnnnnnnnnnnnnnnnnnnnnnnnnnnnnnnnnnnnnnnnnnnnnnnnnnnnnnnnnnnnnnnnnnnnnnnnnnnnnnnnnnnnnnnnnnnnnnnnnnnnnnnnnnnnnnnnnnnnnnnnnnnnnnnnnnnnnnnnnnnnnnnnnnnnnnnnnnnnnnnnnnnnnnnnnnnnnnnnnnnnnnnnnnnnnnnnnnnnnnnnnnnnnnnnnnnnnnnnnnnnnnnnnnnnnnnnnnnnnnnnnnnnnnnnnnnnnnnnnnnnnnnnnnnnnnnnnnnnnnnnnnnnnnnnnnnnnnnnnnnnnnnnnnnnnnnnnnnnnnnnnnnnnnnnnnnnnnnnnnnnnnnnnnnnnnnnnnnnnnnnnnnnnnnnnnnnnnnnnnnnnnnnnnnnnnnnnnnnnnnnnnnnnnnnnnnnnnnnnnnnnnnnnnnnnnnnnnnnnnnnnnnnnnnnnnnnnnnnnnnnnnnnnnnnnnnnnnnnnnnnnnnnnnnnnnnnnnnnnnnnnnnnnnnnnnnnnnnnnnnnnnnnnnnnnnnnnnnnnnnnnnnnnnnnnnnnnnnnnnnnnnnnnnnnnnnnnnnnnnnnnnnnnnnnnnnnnnnnnnnnnnnnnnnnnnnnnnnnnnnnnnnnnnnnnnnnnnnnnnnnnnnnnnnnnnnnnnnnnnnnnnnnnnnnnnnnnnnnnnnnnnnnnnnnnnnnnnnnnnnnnnnnnnnnnnnnnnnnnnnnnnnnnnnnnnnnnnnnnnnnnnnnnnnnnnnnnnnnnnnnnnnnnnnnnnnnnnnnnnnnnnnnnnnnnnnnnnnnnnnnnnnnnnnnnnnnnnnnnnnnnnnnnnnnnnnnnnnnnnnnnnnnnnnnnnnnnnnnnnnnnnnnnnnnnnnnnnnnnnnnnnnnnnnnnnnnnnnnnnnnnnnnnnnnnnnnnnnnnnnnnnnnnnnnnnnnnnnnnnnnnnnnnnnnnnnnnnnnnnnnnnnnnnnnnnnnnnnnnnnnnnnnnnnnnnnnnnnnnnnnnnnnnnnnnnnnnnnnnnnnnnnnnnnnnnnnnnnnnnnnnnnnnnnnnnnnnnnnnnnnnnnnnnnnnnnnnnnnnnnnnnnnnnnnnnnnnnnnnnnnnnnnnnnnnnnnnnnnnnnnnnnnnnnnnnnnnnnnnnnnnnnnnnnnnnnnnnnnnnnnnnnnnnnnnnnnnnnnnnnnnnnnnnnnnnnnnnnnnnnnnnnnnnnnnnnnnnnnnnnnnnnnnnnnnnnnnnnnnnnnnnnnnnnnnnnnnnnnnnnnnnnnnnnnnnnnnnnnnnnnnnnnnnnnnnnnnnnnnnnnnnnnnnnnnnnnnnnnnnnnnnnnnnnnnnnnnnnnnnnnnnnnnnnnnnnnnnnnnnnnnnnnnnnnnnnnnnnnnnnnnnnnnnnnnnnnnnnnnnnnnnnnnnnnnnnnnnnnnnnnnnnnnnnnnnnnnnnnnnnnnnnnnnnnnnnnnnnnnnnnnnnnnnnnnnnnnnnnnnnnnnnnnnnnnnnnnnnnnnnnnnnnnnnnnnnnnnnnnnnnnnnnnnnnnnnnnnnnnnnnnnnnnnnnnnnnnnnnnnnnnnnnnnnnnnnnnnnnnnnnnnnnnnnnnnnnnnnnnnnnnnnnnnnnnnnnnnnnnnnnnnnnnnnnnnnnnnnnnnnnnnnnnnnnnnnnnnnnnnnnnnnnnnnnnnnnnnnnnnnnnnnnnnnnnnnnnnnnnnnnnnnnnnnnnnnnnnnnnnnnnnnnnnnnnnnnnnnnnnnnnnnnnnnnnnnnnnnnnnnnnnnnnnnnnnnnnnnnnnnnnnnnnnnnnnnnnnnnnnnnnnnnnnnnnnnnnnnnnnnnnnnnnnnnnnnnnnnnnnnnnnnnnnnnnnnnnnnnnnnnnnnnnnnnnnnnnnnnnnnnnnnnnnnnnnnnnnnnnnnnnnnnnnnnnnnnnnnnnnnnnnnnnnnnnnnnnnnnnnnnnnnnnnnnnnnnnnnnnnnnnnnnnnnnnnnnnnnnnnnnnnnnnnnnnnnnnnnnnnnnnnnnnnnnnnnnnnnnnnnnnnnnnnnnnnnnnnnnnnnnnnnnnnnnnnnnnnnnnnnnnnnnnnnnnnnnnnnnnnnnnnnnnnnnnnnnnnnnnnnnnnnnnnnnnnnnnnnnnnnnnnnnnnnnnnnnnnnnnnnnnnnnnnnnnnnnnnnnnnnnnnnnnnnnnnnnnnnnnnnnnnnnnnnnnnnnnnnnnnnnnnnnnnnnnnnnnnnnnnnnnnnnnnnnnnnnnnnnnnnnnnnnnnnnnnnnnnnnnnnnnnnnnnnnnnnnnnnnnnnnnnnnnnnnnnnnnnnnnnnnnnnnnnnnnnnnnnnnnnnnnnnnnnnnnnnnnnnnnnnnnnnnnnnnnnnnnnnnnnnnnnnnnnnnnnnnnnnnnnnnnnnnnnnnnnnnnnnnnnnnnnnnnnnnnnnnnnnnnnnnnnnnnnnnnnnnnnnnnnnnnnnnnnnnnnnnnnnnnnnnnnnnnnnnnnnnnnnnnnnnnnnnnnnnnnnnnnnnnnnnnnnnnnnnnnnnnnnnnnnnnnnnnnnnnnnnnnnnnnnnnnnnnnnnnnnnnnnnnnnnnnnnnnnnnnnnnnnnnnnnnnnnnnnnnnnnnnnnnnnnnnnnnnnnnnnnnnnnnnnnnnnnnnnnnnnnnnnnnnnnnnnnnnnnnnnnnnnnnnnnnnnnnnnnnnnnnnnnnnnnnnnnnnnnnnnnnnnnnnnnnnnnnnnnnnnnnnnnnnnnnnnnnnnnnnnnnnnnnnnnnnnnnnnnnnnnnnnnnnnnnnnnnnnnnnnnnnnnnnnnnnnnnnnnnnnnnnnnnnnnnnnnnnnnnnnnnnnnnnnnnnnnnnnnnnnnnnnnnnnnnnnnnnnnnnnnnnnnnnnnnnnnnnnnnnnnnnnnnnnnnnnnnnnnnnnnnnnnnnnnnnnnnnnnnnnnnnnnnnnnnnnnnnnnnnnnnnnnnnnnnnnnnnnnnnnnnnnnnnnnnnnnnnnnnnnnnnnnnnnnnnnnnnnnnnnnnnnnnnnnnnnnnnnnnnnnnnnnnnnnnnnnnnnnnnnnnnnnnnnnnnnnnnnnnnnnnnnnnnnnnnnnnnnnnnnnnnnnnnnnnnnnnnnnnnnnnnnnnnnnnnnnnnnnnnnnnnnnnnnnnnnnnnnnnnnnnnnnnnnnnnnnnnnnnnnnnnnnnnnnnnnnnnnnnnnnnnnnnnnnnnnnnnnnnnnnnnnnnnnnnnnnnnnnnnnnnnnnnnnnnnnnnnnnnnnnnnnnnnnnnnnnnnnnnnnnnnnnnnnnnnnnnnnnnnnnnnnnnnnnnnnnnnnnnnnnnnnnnnnnnnnnnnnnnnnnnnnnnnnnnnnnnnnnnnnnnnnnnnnnnnnnnnnnnnnnnnnnnnnnnnnnnnnnnnnnnnnnnnnnnnnnnnnnnnnnnnnnnnnnnnnnnnnnnnnnnnnnnnnnnnnnnnnnnnnnnnnnnnnnnnnnnnnnnnnnnnnnnnnnnnnnnnnnnnnnnnnnnnnnnnnnnnnnnnnnnnnnnnnnnnnnnnnnnnnnnnnnnnnnnnnnnnnnnnnnnnnnnnnnnnnnnnnnnnnnnnnnnnnnnnnnnnnnnnnnnnnnnnnnnnnnnnnnnnnnnnnnnnnnnnnnnnnnnnnnnnnnnnnnnnnnnnnnnnnnnnnnnnnnnnnnnnnnnnnnnnnnnnnnnnnnnnnnnnnnnnnnnnnnnnnnnnnnnnnnnnnnnnnnnnnnnnnnnnnnnnnnnnnnnnnnnnnnnnnnnnnnnnnnnnnnnnnnnnnnnnnnnnnnnnnnnnnnnnnnnnnnnnnnnnnnnnnnnnnnnnnnnnnnnnnnnnnnnnnnnnnnnnnnnnnnnnnnnnnnnnnnnnnnnnnnnnnnnnnnnnnnnnnnnnnnnnnnnnnnnnnnnnnnnnnnnnnnnnnnnnnnnnnnnnnnnnnnnnnnnnnnnnnnnnnnnnnnnnnnnnnnnnnnnnnnnnnnnnnnnnnnnnnnnnnnnnnnnnnnnnnnnnnnnnnnnnnnnnnnnnnnnnnnnnnnnnnnnnnnnnnnnnnnnnnnnnnnnnnnnnnnnnnnnnnnnnnnnnnnnnnnnnnnnnnnnnnnnnnnnnnnnnnnnnnnnnnnnnnnnnnnnnnnnnnnnnnnnnnnnnnnnnnnnnnnnnnnnnnnnnnnnnnnnnnnnnnnnnnnnnnnnnnnnnnnnnnnnnnnnnnnnnnnnnnnnnnnnnnnnnnnnnnnnnnnnnnnnnnnnnnnnnnnnnnnnnnnnnnnnnnnnnnnnnnnnnnnnnnnnnnnnnnnnnnnnnnnnnnnnnnnnnnnnnnnnnnnnnnnnnnnnnnnnnnnnnnnnnnnnnnnnnnnnnnnnnnnnnnnnnnnnnnnnnnnnnnnnnnnnnnnnnnnnnnnnnnnnnnnnnnnnnnnnnnnnnnnnnnnnnnnnnnnnnnnnnnnnnnnnnnnnnnnnnnnnnnnnnnnnnnnnnnnnnnnnnnnnnnnnnnnnnnnnnnnnnnnnnnnnnnnnnnnnnnnnnnnnnnnnnnnnnnnnnnnnnnnnnnnnnnnnnnnnnnnnnnnnnnnnnnnnnnnnnnnnnnnnnnnnnnnnnnnnnnnnnnnnnnnnnnnnnnnnnnnnnnnnnnnnnnnnnnnnnnnnnnnnnnnnnnnnnnnnnnnnnnnnnnnnnnnnnnnnnnnnnnnnnnnnnnnnnnnnnnnnnnnnnnnnnnnnnnnnnnnnnnnnnnnnnnnnnnnnnnnnnnnnnnnnnnnnnnnnnnnnnnnnnnnnnnnnnnnnnnnnnnnnnnnnnnnnnnnnnnnnnnnnnnnnnnnnnnnnnnnnnnnnnnnnnnnnnnnnnnnnnnnnnnnnnnnnnnnnnnnnnnnnnnnnnnnnnnnnnnnnnnnnnnnnnnnnnnnnnnnnnnnnnnnnnnnnnnnnnnnnnnnnnnnnnnnnnnnnnnnnnnnnnnnnnnnnnnnnnnnnnnnnnnnnnnnnnnnnnnnnnnnnnnnnnnnnnnnnnnnnnnnnnnnnnnnnnnnnnnnnnnnnnnnnnnnnnnnnnnnnnnnnnnnnnnnnnnnnnnnnnnnnnnnnnnnnnnnnnnnnnnnnnnnnnnnnnnnnnnnnnnnnnnnnnnnnnnnnnnnnnnnnnnnnnnnnnnnnnnnnnnnnnnnnnnnnnnnnnnnnnnnnnnnnnnnnnnnnnnnnnnnnnnnnnnnnnnnnnnnnnnnnnnnnnnnnnnnnnnnnnnnnnnnnnnnnnnnnnnnnnnnnnnnnnnnnnnnnnnnnnnnnnnnnnnnnnnnnnnnnnnnnnnnnnnnnnnnnnnnnnnnnnnnnnnnnnnnnnnnnnnnnnnnnnnnnnnnnnnnnnnnnnnnnnnnnnnnnnnnnnnnnnnnnnnnnnnnnnnnnnnnnnnnnnnnnnnnnnnnnnnnnnnnnnnnnnnnnnnnnnnnnnnnnnnnnnnnnnnnnnnnnnnnnnnnnnnnnnnnnnnnnnnnnnnnnnnnnnnnnnnnnnnnnnnnnnnnnnnnnnnnnnnnnnnnnnnnnnnnnnnnnnnnnnnnnnnnnnnnnnnnnnnnnnnnnnnnnnnnnnnnnnnnnnnnnnnnnnnnnnnnnnnnnnnnnnnnnnnnnnnnnnnnnnnnnnnnnnnnnnnnnnnnnnnnnnnnnnnnnnnnnnnnnnnnnnnnnnnnnnnnnnnnnnnnnnnnnnnnnnnnnnnnnnnnnnnnnnnnnnnnnnnnnnnnnnnnnnnnnnnnnnnnnnnnnnnnnnnnnnnnnnnnnnnnnnnnnnnnnnnnnnnnnnnnnnnnnnnnnnnnnnnnnnnnnnnnnnnnnnnnnnnnnnnnnnnnnnnnnnnnnnnnnnnnnnnnnnnnnnnnnnnnnnnnnnnnnnnnnnnnnnnnnnnnnnnnnnnnnnnnnnnnnnnnnnnnnnnnnnnnnnnnnnnnnnnnnnnnnnnnnnnnnnnnnnnnnnnnnnnnnnnnnnnnnnnnnnnnnnnnnnnnnnnnnnnnnnnnnnnnnnnnnnnnnnnnnnnnnnnnnnnnnnnnnnnnnnnnnnnnnnnnnnnnnnnnnnnnnnnnnnnnnnnnnnnnnnnnnnnnnnnnnnnnnnnnnnnnnnnnnnnnnnnnnnnnnnnnnnnnnnnnnnnnnnnnnnnnnnnnnnnnnnnnnnnnnnnnnnnnnnnnnnnnnnnnnnnnnnnnnnnnnnnnnnnnnnnnnnnnnnnnnnnnnnnnnnnnnnnnnnnnnnnnnnnnnnnnnnnnnnnnnnnnnnnnnnnnnnnnnnnnnnnnnnnnnnnnnnnnnnnnnnnnnnnnnnnnnnnnnnnnnnnnnnnnnnnnnnnnnnnnnnnnnnnnnnnnnnnnnnnnnnnnnnnnnnnnnnnnnnnnnnnnnnnnnnnnnnnnnnnnnnnnnnnnnnnnnnnnnnnnnnnnnnnnnnnnnnnnnnnnnnnnnnnnnnnnnnnnnnnnnnnnnnnnnnnnnnnnnnnnnnnnnnnnnnnnnnnnnnnnnnnnnnnnnnnnnnnnnnnnnnnnnnnnnnnnnnnnnnnnnnnnnnnnnnnnnnnnnnnnnnnnnnnnnnnnnnnnnnnnnnnnnnnnnnnnnnnnnnnnnnnnnnnnnnnnnnnnnnnnnnnnnnnnnnnnnnnnnnnnnnnnnnnnnnnnnnnnnnnnnnnnnnnnnnnnnnnnnnnnnnnnnnnnnnnnnnnnnnnnnnnnnnnnnnnnnnnnnnnnnnnnnnnnnnnnnnnnnnnnnnnnnnnnnnnnnnnnnnnnnnnnnnnnnnnnnnnnnnnnnnnnnnnnnnnnnnnnnnnnnnnnnnnnnnnnnnnnnnnnnnnnnnnnnnnnnnnnnnnnnnnnnnnnnnnnnnnnnnnnnnnnnnnnnnnnnnnnnnnnnnnnnnnnnnnnnnnnnnnnnnnnnnnnnnnnnnnnnnnnnnnnnnnnnnnnnnnnnnnnnnnnnnnnnnnnnnnnnnnnnnnnnnnnnnnnnnnnnnnnnnnnnnnnnnnnnnnnnnnnnnnnnnnnnnnnnnnnnnnnnnnnnnnnnnnnnnnnnnnnnnnnnnnnnnnnnnnnnnnnnnnnnnnnnnnnnnnnnnnnnnnnnnnnnnnnnnnnnnnnnnnnnnnnnnnnnnnnnnnnnnnnnnnnnnnnnnnnnnnnnnnnnnnnnnnnnnnnnnnnnnnnnnnnnnnnnnnnnnnnnnnnnnnnnnnnnnnnnnnnnnnnnnnnnnnnnnnnnnnnnnnnnnnnnnnnnnnnnnnnnnnnnnnnnnnnnnnnnnnnnnnnnnnnnnnnnnnnnnnnnnnnnnnnnnnnnnnnnnnnnnnnnnnnnnnnnnnnnnnnnnnnnnnnnnnnnnnnnnnnnnnnnnnnnnnnnnnnnnnnnnnnnnnnnnnnnnnnnnnnnnnnnnnnnnnnnnnnnnnnnnnnnnnnnnnnnnnnnnnnnnnnnnnnnnnnnnnnnnnnnnnnnnnnnnnnnnnnnnnnnnnnnnnnnnnnnnnnnnnnnnnnnnnnnnnnnnnnnnnnnnnnnnnnnnnnnnnnnnnnnnnnnnnnnnnnnnnnnnnnnnnnnnnnnnnnnnnnnnnnnnnnnnnnnnnnnnnnnnnnnnnnnnnnnnnnnnnnnnnnnnnnnnnnnnnnnnnnnnnnnnnnnnnnnnnnnnnnnnnnnnnnnnnnnnnnnnnnnnnnnnnnnnnnnnnnnnnnnnnnnnnnnnnnnnnnnnnnnnnnnnnnnnnnnnnnnnnnnnnnnnnnnnnnnnnnnnnnnnnnnnnnnnnnnnnnnnnnnnnnnnnnnnnnnnnnnnnnnnnnnnnnnnnnnnnnnnnnnnnnnnnnnnnnnnnnnnnnnnnnnnnnnnnnnnnnnnnnnnnnnnnnnnnnnnnnnnnnnnnnnnnnnnnnnnnnnnnnnnnnnnnnnnnnnnnnnnnnnnnnnnnnnnnnnnnnnnnnnnnnnnnnnnnnnnnnnnnnnnnnnnnnnnnnnnnnnnnnnnnnnnnnnnnnnnnnnnnnnnnnnnnnnnnnnnnnnnnnnnnnnnnnnnnnnnnnnnnnnnnnnnnnnnnnnnnnnnnnnnnnnnnnnnnnnnnnnnnnnnnnnnnnnnnnnnnnnnnnnnnnnnnnnnnnnnnnnnnnnnnnnnnnnnnnnnnnnnnnnnnnnnnnnnnnnnnnnnnnnnnnnnnnnnnnnnnnnnnnnnnnnnnnnnnnnnnnnnnnnnnnnnnnnnnnnnnnnnnnnnnnnnnnnnnnnnnnnnnnnnnnnnnnnnnnnnnnnnnnnnnnnnnnnnnnnnnnnnnnnnnnnnnnnnnnnnnnnnnnnnnnnnnnnnnnnnnnnnnnnnnnnnnnnnnnnnnnnnnnnnnnnnnnnnnnnnnnnnnnnnnnnnnnnnnnnnnnnnnnnnnnnnnnnnnnnnnnnnnnnnnnnnnnnnnnnnnnnnnnnnnnnnnnnnnnnnnnnnnnnnnnnnnnnnnnnnnnnnnnnnnnnnnnnnnnnnnnnnnnnnnnnnnnnnnnnnnnnnnnnnnnnnnnnnnnnnnnnnnnnnnnnnnnnnnnnnnnnnnnnnnnnnnnnnnnnnnnnnnnnnnnnnnnnnnnnnnnnnnnnnnnnnnnnnnnnnnnnnnnnnnnnnnnnnnnnnnnnnnnnnnnnnnnnnnnnnnnnnnnnnnnnnnnnnnnnnnnnnnnnnnnnnnnnnnnnnnnnnnnnnnnnnnnnnnnnnnnnnnnnnnnnnnnnnnnnnnnnnnnnnnnnnnnnnnnnnnnnnnnnnnnnnnnnnnnnnnnnnnnnnnnnnnnnnnnnnnnnnnnnnnnnnnnnnnnnnnnnnnnnnnnnnnnnnnnnnnnnnnnnnnnnnnnnnnnnnnnnnnnnnnnnnnnnnnnnnnnnnnnnnnnnnnnnnnnnnnnnnnnnnnnnnnnnnnnnnnnnnnnnnnnnnnnnnnnnnnnnnnnnnnnnnnnnnnnnnnnnnnnnnnnnnnnnnnnnnnnnnnnnnnnnnnnnnnnnnnnnnnnnnnnnnnnnnnnnnnnnnnnnnnnnnnnnnnnnnnnnnnnnnnnnnnnnnnnnnnnnnnnnnnnnnnnnnnnnnnnnnnnnnnnnnnnnnnnnnnnnnnnnnnnnnnnnnnnnnnnnnnnnnnnnnnnnnnnnnnnnnnnnnnnnnnnnnnnnnnnnnnnnnnnnnnnnnnnnnnnnnnnnnnnnnnnnnnnnnnnnnnnnnnnnnnnnnnnnnnnnnnnnnnnnnnnnnnnnnnnnnnnnnnnnnnnnnnnnnnnnnnnnnnnnnnnnnnnnnnnnnnnnnnnnnnnnnnnnnnnnnnnnnnnnnnnnnnnnnnnnnnnnnnnnnnnnnnnnnnnnnnnnnnnnnnnnnnnnnnnnnnnnnnnnnnnnnnnnnnnnnnnnnnnnnnnnnnnnnnnnnnnnnnnnnnnnnnnnnnnnnnnnnnnnnnnnnnnnnnnnnnnnnnnnnnnnnnnnnnnnnnnnnnnnnnnnnnnnnnnnnnnnnnnnnnnnnnnnnnnnnnnnnnnnnnnnnnnnnnnnnnnnnnnnnnnnnnnnnnnnnnnnnnnnnnnnnnnnnnnnnnnnnnnnnnnnnnnnnnnnnnnnnnnnnnnnnnnnnnnnnnnnnnnnnnnnnnnnnnnnnnnnnnnnnnnnnnnnnnnnnnnnnnnnnnnnnnnnnnnnnnnnnnnnnnnnnnnnnnnnnnnnnnnnnnnnnnnnnnnnnnnnnnnnnnnnnnnnnnnnnnnnnnnnnnnnnnnnnnnnnnnnnnnnnnnnnnnnnnnnnnnnnnnnnnnnnnnnnnnnnnnnnnnnnnnnnnnnnnnnnnnnnnnnnnnnnnnnnnnnnnnnnnnnnnnnnnnnnnnnnnnnnnnnnnnnnnnnnnnnnnnnnnnnnnnnnnnnnnnnnnnnnnnnnnnnnnnnnnnnnnnnnnnnnnnnnnnnnnnnnnnnnnnnnnnnnnnnnnnnnnnnnnnnnnnnnnnnnnnnnnnnnnnnnnnnnnnnnnnnnnnnnnnnnnnnnnnnnnnnnnnnnnnnnnnnnnnnnnnnnnnnnnnnnnnnnnnnnnnnnnnnnnnnnnnnnnnnnnnnnnnnnnnnnnnnnnnnnnnnnnnnnnnnnnnnnnnnnnnnnnnnnnnnnnnnnnnnnnnnnnnnnnnnnnnnnnnnnnnnnnnnnnnnnnnnnnnnnnnnnnnnnnnnnnnnnnnnnnnnnnnnnnnnnnnnnnnnnnnnnnnnnnnnnnnnnnnnnnnnnnnnnnnnnnnnnnnnnnnnnnnnnnnnnnnnnnnnnnnnnnnnnnnnnnnnnnnnnnnnnnnnnnnnnnnnnnnnnnnnnnnnnnnnnnnnnnnnnnnnnnnnnnnnnnnnnnnnnnnnnnnnnnnnnnnnnnnnnnnnnnnnnnnnnnnnnnnnnnnnnnnnnnnnnnnnnnnnnnnnnnnnnnnnnnnnnnnnnnnnnnnnnnnnnnnnnnnnnnnnnnnnnnnnnnnnnnnnnnnnnnnnnnnnnnnnnnnnnnnnnnnnnnnnnnnnnnnnnnnnnnnnnnnnnnnnnnnnnnnnnnnnnnnnnnnnnnnnnnnnnnnnnnnnnnnnnnnnnnnnnnnnnnnnnnnnnnnnnnnnnnnnnnnnnnnnnnnnnnnnnnnnnnnnnnnnnnnnnnnnnnnnnnnnnnnnnnnnnnnnnnnnnnnnnnnnnnnnnnnnnnnnnnnnnnnnnnnnnnnnnnnnnnnnnnnnnnnnnnnnnnnnnnnnnnnnnnnnnnnnnnnnnnnnnnnnnnnnnnnnnnnnnnnnnnnnnnnnnnnnnnnnnnnnnnnnnnnnnnnnnnnnnnnnnnnnnnnnnnnnnnnnnnnnnnnnnnnnnnnnnnnnnnnnnnnnnnnnnnnnnnnnnnnnnnnnnnnnnnnnnnnnnnnnnnnnnnnnnnnnnnnnnnnnnnnnnnnnnnnnnnnnnnnnnnnnnnnnnnnnnnnnnnnnnnnnnnnnnnnnnnnnnnnnnnnnnnnnnnnnnnnnnnnnnnnnnnnnnnnnnnnnnnnnnnnnnnnnnnnnnnnnnnnnnnnnnnnnnnnnnnnnnnnnnnnnnnnnnnnnnnnnnnnnnnnnnnnnnnnnnnnnnnnnnnnnnnnnnnnnnnnnnnnnnnnnnnnnnnnnnnnnnnnnnnnnnnnnnnnnnnnnnnnnnnnnnnnnnnnnnnnnnnnnnnnnnnnnnnnnnnnnnnnnnnnnnnnnnnnnnnnnnnnnnnnnnnnnnnnnnnnnnnnnnnnnnnnnnnnnnnnnnnnnnnnnnnnnnnnnnnnnnnnnnnnnnnnnnnnnnnnnnnnnnnnnnnnnnnnnnnnnnnnnnnnnnnnnnnnnnnnnnnnnnnnnnnnnnnnnnnnnnnnnnnnnnnnnnnnnnnnnnnnnnnnnnnnnnnnnnnnnnnnnnnnnnnnnnnnnnnnnnnnnnnnnnnnnnnnnnnnnnnnnnnnnnnnnnnnnnnnnnnnnnnnnnnnnnnnnnnnnnnnnnnnnnnnnnnnnnnnnnnnnnnnnnnnnnnnnnnnnnnnnnnnnnnnnnnnnnnnnnnnnnnnnnnnnnnnnnnnnnnnnnnnnnnnnnnnnnnnnnnnnnnnnnnnnnnnnnnnnnnnnnnnnnnnnnnnnnnnnnnnnnnnnnnnnnnnnnnnnnnnnnnnnnnnnnnnnnnnnnnnnnnnnnnnnnnnnnnnnnnnnnnnnnnnnnnnnnnnnnnnnnnnnnnnnnnnnnnnnnnnnnnnnnnnnnnnnnnnnnnnnnnnnnnnnnnnnnnnnnnnnnnnnnnnnnnnnnnnnnnnnnnnnnnnnnnnnnnnnnnnnnnnnnnnnnnnnnnnnnnnnnnnnnnnnnnnnnnnnnnnnnnnnnnnnnnnnnnnnnnnnnnnnnnnnnnnnnnnnnnnnnnnnnnnnnnnnnnnnnnnnnnnnnnnnnnnnnnnnnnnnnnnnnnnnnnnnnnnnnnnnnnnnnnnnnnnnnnnnnnnnnnnnnnnnnnnnnnnnnnnnnnnnnnnnnnnnnnnnnnnnnnnnnnnnnnnnnnnnnnnnnnnnnnnnnnnnnnnnnnnnnnnnnnnnnnnnnnnnnnnnnnnnnnnnnnnnnnnnnnnnnnnnnnnnnnnnnnnnnnnnnnnnnnnnnnnnnnnnnnnnnnnnnnnnnnnnnnnnnnnnnnnnnnnnnnnnnnnnnnnnnnnnnnnnnnnnnnnnnnnnnnnnnnnnnnnnnnnnnnnnnnnnnnnnnnnnnnnnnnnnnnnnnnnnnnnnnnnnnnnnnnnnnnnnnnnnnnnnnnnnnnnnnnnnnnnnnnnnnnnnnnnnnnnnnnnnnnnnnnnnnnnnnnnnnnnnnnnnnnnnnnnnnnnnnnnnnnnnnnnnnnnnnnnnnnnnnnnnnnnnnnnnnnnnnnnnnnnnnnnnnnnnnnnnnnnnnnnnnnnnnnnnnnnnnnnnnnnnnnnnnnnnnnnnnnnnnnnnnnnnnnnnnnnnnnnnnnnnnnnnnnnnnnnnnnnnnnnnnnnnnnnnnnnnnnnnnnnnnnnnnnnnnnnnnnnnnnnnnnnnnnnnnnnnnnnnnnnnnnnnnnnnnnnnnnnnnnnnnnnnnnnnnnnnnnnnnnnnnnnnnnnnnnnnnnnnnnnnnnnnnnnnnnnnnnnnnnnnnnnnnnnnnnnnnnnnnnnnnnnnnnnnnnnnnnnnnnnnnnnnnnnnnnnnnnnnnnnnnnnnnnnnnnnnnnnnnnnnnnnnnnnnnnnnnnnnnnnnnnnnnnnnnnnnnnnnnnnnnnnnnnnnnnnnnnnnnnnnnnnnnnnnnnnnnnnnnnnnnnnnnnnnnnnnnnnnnnnnnnnnnnnnnnnnnnnnnnnnnnnnnnnnnnnnnnnnnnnnnnnnnnnnnnnnnnnnnnnnnnnnnnnnnnnnnnnnnnnnnnnnnnnnnnnnnnnnnnnnnnnnnnnnnnnnnnnnnnnnnnnnnnnnnnnnnnnnnnnnnnnnnnnnnnnnnnnnnnnnnnnnnnnnnnnnnnnnnnnnnnnnnnnnnnnnnnnnnnnnnnnnnnnnnnnnnnnnnnnnnnnnnnnnnnnnnnnnnnnnnnnnnnnnnnnnnnnnnnnnnnnnnnnnnnnnnnnnnnnnnnnnnnnnnnnnnnnnnnnnnnnnnnnnnnnnnnnnnnnnnnnnnnnnnnnnnnnnnnnnnnnnnnnnnnnnnnnnnnnnnnnnnnnnnnnnnnnnnnnnnnnnnnnnnnnnnnnnnnnnnnnnnnnnnnnnnnnnnnnnnnnnnnnnnnnnnnnnnnnnnnnnnnnnnnnnnnnnnnnnnnnnnnnnnnnnnnnnnnnnnnnnnnnnnnnnnnnnnnnnnnnnnnnnnnnnnnnnnnnnnnnnnnnnnnnnnnnnnnnnnnnnnnnnnnnnnnnnnnnnnnnnnnnnnnnnnnnnnnnnnnnnnnnnnnnnnnnnnnnnnnnnnnnnnnnnnnnnnnnnnnnnnnnnnnnnnnnnnnnnnnnnnnnnnnnnnnnnnnnnnnnnnnnnnnnnnnnnnnnnnnnnnnnnnnnnnnnnnnnnnnnnnnnnnnnnnnnnnnnnnnnnnnnnnnnnnnnnnnnnnnnnnnnnnnnnnnnnnnnnnnnnnnnnnnnnnnnnnnnnnnnnnnnnnnnnnnnnnnnnnnnnnnnnnnnnnnnnnnnnnnnnnnnnnnnnnnnnnnnnnnnnnnnnnnnnnnnnnnnnnnnnnnnnnnnnnnnnnnnnnnnnnnnnnnnnnnnnnnnnnnnnnnnnnnnnnnnnnnnnnnnnnnnnnnnnnnnnnnnnnnnnnnnnnnnnnnnnnnnnnnnnnnnnnnnnnnnnnnnnnnnnnnnnnnnnnnnnnnnnnnnnnnnnnnnnnnnnnnnnnnnnnnnnnnnnnnnnnnnnnnnnnnnnnnnnnnnnnnnnnnnnnnnnnnnnnnnnnnnnnnnnnnnnnnnnnnnnnnnnnnnnnnnnnnnnnnnnnnnnnnnnnnnnnnnnnnnnnnnnnnnnnnnnnnnnnnnnnnnnnnnnnnnnnnnnnnnnnnnnnnnnnnnnnnnnnnnnnnnnnnnnnnnnnnnnnnnnnnnnnnnnnnnnnnnnnnnnnnnnnnnnnnnnnnnnnnnnnnnnnnnnnnnnnnnnnnnnnnnnnnnnnnnnnnnnnnnnnnnnnnnnnnnnnnnnnnnnnnnnnnnnnnnnnnnnnnnnnnnnnnnnnnnnnnnnnnnnnnnnnnnnnnnnnnnnnnnnnnnnnnnnnnnnnnnnnnnnnnnnnnnnnnnnnnnnnnnnnnnnnnnnnnnnnnnnnnnnnnnnnnnnnnnnnnnnnnnnnnnnnnnnnnnnnnnnnnnnnnnnnnnnnnnnnnnnnnnnnnnnnnnnnnnnnnnnnnnnnnnnnnnnnnnnnnnnnnnnnnnnnnnnnnnnnnnnnnnnnnnnnnnnnnnnnnnnnnnnnnnnnnnnnnnnnnnnnnnnnnnnnnnnnnnnnnnnnnnnnnnnnnnnnnnnnnnnnnnnnnnnnnnnnnnnnnnnnnnnnnnnnnnnnnnnnnnnnnnnnnnnnnnnnnnnnnnnnnnnnnnnnnnnnnnnnnnnnnnnnnnnnnnnnnnnnnnnnnnnnnnnnnnnnnnnnnnnnnnnnnnnnnnnnnnnnnnnnnnnnnnnnnnnnnnnnnnnnnnnnnnnnnnnnnnnnnnnnnnnnnnnnnnnnnnnnnnnnnnnnnnnnnnnnnnnnnnnnnnnnnnnnnnnnnnnnnnnnnnnnnnnnnnnnnnnnnnnnnnnnnnnnnnnnnnnnnnnnnnnnnnnnnnnnnnnnnnnnnnnnnnnnnnnnnnnnnnnnnnnnnnnnnnnnnnnnnnnnnnnnnnnnnnnnnnnnnnnnnnnnnnnnnnnnnnnnnnnnnnnnnnnnnnnnnnnnnnnnnnnnnnnnnnnnnnnnnnnnnnnnnnnnnnnnnnnnnnnnnnnnnnnnnnnnnnnnnnnnnnnnnnnnnnnnnnnnnnnnnnnnnnnnnnnnnnnnnnnnnnnnnnnnnnnnnnnnnnnnnnnnnnnnnnnnnnnnnnnnnnnnnnnnnnnnnnnnnnnnnnnnnnnnnnnnnnnnnnnnnnnnnnnnnnnnnnnnnnnnnnnnnnnnnnnnnnnnnnnnnnnnnnnnnnnnnnnnnnnnnnnnnnnnnnnnnnnnnnnnnnnnnnnnnnnnnnnnnnnnnnnnnnnnnnnnnnnnnnnnnnnnnnnnnnnnnnnnnnnnnnnnnnnnnnnnnnnnnnnnnnnnnnnnnnnnnnnnnnnnnnnnnnnnnnnnnnnnnnnnnnnnnnnnnnnnnnnnnnnnnnnnnnnnnnnnnnnnnnnnnnnnnnnnnnnnnnnnnnnnnnnnnnnnnnnnnnnnnnnnnnnnnnnnnnnnnnnnnnnnnnnnnnnnnnnnnnnnnnnnnnnnnnnnnnnnnnnnnnnnnnnnnnnnnnnnnnnnnnnnnnnnnnnnnnnnnnnnnnnnnnnnnnnnnnnnnnnnnnnnnnnnnnnnnnnnnnnnnnnnnnnnnnnnnnnnnnnnnnnnnnnnnnnnnnnnnnnnnnnnnnnnnnnnnnnnnnnnnnnnnnnnnnnnnnnnnnnnnnnnnnnnnnnnnnnnnnnnnnnnnnnnnnnnnnnnnnnnnnnnnnnnnnnnnnnnnnnnnnnnnnnnnnnnnnnnnnnnnnnnnnnnnnnnnnnnnnnnnnnnnnnnnnnnnnnnnnnnnnnnnnnnnnnnnnnnnnnnnnnnnnnnnnnnnnnnnnnnnnnnnnnnnnnnnnnnnnnnnnnnnnnnnnnnnnnnnnnnnnnnnnnnnnnnnnnnnnnnnnnnnnnnnnnnnnnnnnnnnnnnnnnnnnnnnnnnnnnnnnnnnnnnnnnnnnnnnnnnnnnnnnnnnnnnnnnnnnnnnnnnnnnnnnnnnnnnnnnnnnnnnnnnnnnnnnnnnnnnnnnnnnnnnnnnnnnnnnnnnnnnnnnnnnnnnnnnnnnnnnnnnnnnnnnnnnnnnnnnnnnnnnnnnnnnnnnnnnnnnnnnnnnnnnnnnnnnnnnnnnnnnnnnnnnnnnnnnnnnnnnnnnnnnnnnnnnnnnnnnnnnnnnnnnnnnnnnnnnnnnnnnnnnnnnnnnnnnnnnnnnnnnnnnnnnnnnnnnnnnnnnnnnnnnnnnnnnnnnnnnnnnnnnnnnnnnnnnnnnnnnnnnnnnnnnnnnnnnnnnnnnnnnnnnnnnnnnnnnnnnnnnnnnnnnnnnnnnnnnnnnnnnnnnnnnnnnnnnnnnnnnnnnnnnnnnnnnnnnnnnnnnnnnnnnnnnnnnnnnnnnnnnnnnnnnnnnnnnnnnnnnnnnnnnnnnnnnnnnnnnnnnnnnnnnnnnnnnnnnnnnnnnnnnnnnnnnnnnnnnnnnnnnnnnnnnnnnnnnnnnnnnnnnnnnnnnnnnnnnnnnnnnnnnnnnnnnnnnnnnnnnnnnnnnnnnnnnnnnnnnnnnnnnnnnnnnnnnnnnnnnnnnnnnnnnnnnnnnnnnnnnnnnnnnnnnnnnnnnnnnnnnnnnnnnnnnnnnnnnnnnnnnnnnnnnnnnnnnnnnnnnnnnnnnnnnnnnnnnnnnnnnnnnnnnnnnnnnnnnnnnnnnnnnnnnnnnnnnnnnnnnnnnnnnnnnnnnnnnnnnnnnnnnnnnnnnnnnnnnnnnnnnnnnnnnnnnnnnnnnnnnnnnnnnnnnnnnnnnnnnnnnnnnnnnnnnnnnnnnnnnnnnnnnnnnnnnnnnnnnnnnnnnnnnnnnnnnnnnnnnnnnnnnnnnnnnnnnnnnnnnnnnnnnnnnnnnnnnnnnnnnnnnnnnnnnnnnnnnnnnnnnnnnnnnnnnnnnnnnnnnnnnnnnnnnnnnnnnnnnnnnnnnnnnnnnnnnnnnnnnnnnnnnnnnnnnnnnnnnnnnnnnnnnnnnnnnnnnnnnnnnnnnnnnnnnnnnnnnnnnnnnnnnnnnnnnnnnnnnnnnnnnnnnnnnnnnnnnnnnnnnnnnnnnnnnnnnnnnnnnnnnnnnnnnnnnnnnnnnnnnnnnnnnnnnnnnnnnnnnnnnnnnnnnnnnnnnnnnnnnnnnnnnnnnnnnnnnnnnnnnnnnnnnnnnnnnnnnnnnnnnnnnnnnnnnnnnnnnnnnnnnnnnnnnnnnnnnnnnnnnnnnnnnnnnnnnnnnnnnnnnnnnnnnnnnnnnnnnnnnnnnnnnnnnnnnnnnnnnnnnnnnnnnnnnnnnnnnnnnnnnnnnnnnnnnnnnnnnnnnnnnnnnnnnnnnnnnnnnnnnnnnnnnnnnnnnnnnnnnnnnnnnnnnnnnnnnnnnnnnnnnnnnnnnnnnnnnnnnnnnnnnnnnnnnnnnnnnnnnnnnnnnnnnnnnnnnnnnnnnnnnnnnnnnnnnnnnnnnnnnnnnnnnnnnnnnnnnnnnnnnnnnnnnnnnnnnnnnnnnnnnnnnnnnnnnnnnnnnnnnnnnnnnnnnnnnnnnnnnnnnnnnnnnnnnnnnnnnnnnnnnnnnnnnnnnnnnnnnnnnnnnnnnnnnnnnnnnnnnnnnnnnnnnnnnnnnnnnnnnnnnnnnnnnnnnnnnnnnnnnnnnnnnnnnnnnnnnnnnnnnnnnnnnnnnnnnnnnnnnnnnnnnnnnnnnnnnnnnnnnnnnnnnnnnnnnnnnnnnnnnnnnnnnnnnnnnnnnnnnnnnnnnnnnnnnnnnnnnnnnnnnnnnnnnnnnnnnnnnnnnnnnnnnnnnnnnnnnnnnnnnnnnnnnnnnnnnnnnnnnnnnnnnnnnnnnnnnnnnnnnnnnnnnnnnnnnnnnnnnnnnnnnnnnnnnnnnnnnnnnnnnnnnnnnnnnnnnnnnnnnnnnnnnnnnnnnnnnnnnnnnnnnnnnnnnnnnnnnnnnnnnnnnnnnnnnnnnnnnnnnnnnnnnnnnnnnnnnnnnnnnnnnnnnnnnnnnnnnnnnnnnnnnnnnnnnnnnnnnnnnnnnnnnnnnnnnnnnnnnnnnnnnnnnnnnnnnnnnnnnnnnnnnnnnnnnnnnnnnnnnnnnnnnnnnnnnnnnnnnnnnnnnnnnnnnnnnnnnnnnnnnnnnnnnnnnnnnnnnnnnnnnnnnnnnnnnnnnnnnnnnnnnnnnnnnnnnnnnnnnnnnnnnnnnnnnnnnnnnnnnnnnnnnnnnnnnnnnnnnnnnnnnnnnnnnnnnnnnnnnnnnnnnnnnnnnnnnnnnnnnnnnnnnnnnnnnnnnnnnnnnnnnnnnnnnnnnnnnnnnnnnnnnnnnnnnnnnnnnnnnnnnnnnnnnnnnnnnnnnnnnnnnnnnnnnnnnnnnnnnnnnnnnnnnnnnnnnnnnnnnnnnnnnnnnnnnnnnnnnnnnnnnnnnnnnnnnnnnnnnnnnnnnnnnnnnnnnnnnnnnnnnnnnnnnnnnnnnnnnnnnnnnnnnnnnnnnnnnnnnnnnnnnnnnnnnnnnnnnnnnnnnnnnnnnnnnnnnnnnnnnnnnnnnnnnnnnnnnnnnnnnnnnnnnnnnnnnnnnnnnnnnnnnnnnnnnnnnnnnnnnnnnnnnnnnnnnnnnnnnnnnnnnnnnnnnnnnnnnnnnnnnnnnnnnnnnnnnnnnnnnnnnnnnnnnnnnnnnnnnnnnnnnnnnnnnnnnnnnnnnnnnnnnnnnnnnnnnnnnnnnnnnnnnnnnnnnnnnnnnnnnnnnnnnnnnnnnnnnnnnnnnnnnnnnnnnnnnnnnnnnnnnnnnnnnnnnnnnnnnnnnnnnnnnnnnnnnnnnnnnnnnnnnnnnnnnnnnnnnnnnnnnnnnnnnnnnnnnnnnnnnnnnnnnnnnnnnnnnnnnnnnnnnnnnnnnnnnnnnnnnnnnnnnnnnnnnnnnnnnnnnnnnnnnnnnnnnnnnnnnnnnnnnnnnnnnnnnnnnnnnnnnnnnnnnnnnnnnnnnnnnnnnnnnnnnnnnnnnnnnnnnnnnnnnnnnnnnnnnnnnnnnnnnnnnnnnnnnnnnnnnnnnnnnnnnnnnnnnnnnnnnnnnnnnnnnnnnnnnnnnnnnnnnnnnnnnnnnnnnnnnnnnnnnnnnnnnnnnnnnnnnnnnnnnnnnnnnnnnnnnnnnnnnnnnnnnnnnnnnnnnnnnnnnnnnnnnnnnnnnnnnnnnnnnnnnnnnnnnnnnnnnnnnnnnnnnnnnnnnnnnnnnnnnnnnnnnnnnnnnnnnnnnnnnnnnnnnnnnnnnnnnnnnnnnnnnnnnnnnnnnnnnnnnnnnnnnnnnnnnnnnnnnnnnnnnnnnnnnnnnnnnnnnnnnnnnnnnnnnnnnnnnnnnnnnnnnnnnnnnnnnnnnnnnnnnnnnnnnnnnnnnnnnnnnnnnnnnnnnnnnnnnnnnnnnnnnnnnnnnnnnnnnnnnnnnnnnnnnnnnnnnnnnnnnnnnnnnnnnnnnnnnnnnnnnnnnnnnnnnnnnnnnnnnnnnnnnnnnnnnnnnnnnnnnnnnnnnnnnnnnnnnnnnnnnnnnnnnnnnnnnnnnnnnnnnnnnnnnnnnnnnnnnnnnnnnnnnnnnnnnnnnnnnnnnnnnnnnnnnnnnnnnnnnnnnnnnnnnnnnnnnnnnnnnnnnnnnnnnnnnnnnnnnnnnnnnnnnnnnnnnnnnnnnnnnnnnnnnnnnnnnnnnnnnnnnnnnnnnnnnnnnnnnnnnnnnnnnnnnnnnnnnnnnnnnnnnnnnnnnnnnnnnnnnnnnnnnnnnnnnnnnnnnnnnnnnnnnnnnnnnnnnnnnnnnnnnnnnnnnnnnnnnnnnnnnnnnnnnnnnnnnnnnnnnnnnnnnnnnnnnnnnnnnnnnnnnnnnnnnnnnnnnnnnnnnnnnnnnnnnnnnnnnnnnnnnnnnnnnnnnnnnnnnnnnnnnnnnnnnnnnnnnnnnnnnnnnnnnnnnnnnnnnnnnnnnnnnnnnnnnnnnnnnnnnnnnnnnnnnnnnnnnnnnnnnnnnnnnnnnnnnnnnnnnnnnnnnnnnnnnnnnnnnnnnnnnnnnnnnnnnnnnnnnnnnnnnnnnnnnnnnnnnnnnnnnnnnnnnnnnnnnnnnnnnnnnnnnnnnnnnnnnnnnnnnnnnnnnnnnnnnnnnnnnnnnnnnnnnnnnnnnnnnnnnnnnnnnnnnnnnnnnnnnnnnnnnnnnnnnnnnnnnnnnnnnnnnnnnnnnnnnnccgctcttcaagttcatcgttgatatcgtgcttgaatgctcgatgctccccgatgatcaccggctcataaacctttgtcgccatccaactcagattttgcggattcctcacttcaaccctgtccgggaactgccgacatagcagcttctcgcctatgaaagctttcggacaatcaaggacttcgtaatactcgttgcctatccgaacgctttttgtgccgtccataactctgtaaaacgtcactggcgcatactggaatatgtccgcgccttcagggtaaaatctctgctctctttcagcgaggctcaagccgtaaattctctctctcgacatccccgcgaatttcgggttaggatgagagcgactgttataatctttcagataatttgaaagcatgttttttatttctgcgaacgtaaatactctttccttatcaagtagcaactcaagttcaaacctttgccacaaagtcctccacggacgttcaatttttcctttcgcttttgagttgtatggcttgtttgtttcaagctccacccctaactccctaaacaacaactcgcctctgttttttcccaatgggccgctgtccgttatcagcttttccggcaacccgaaaagcggattgtcatccttcttctgaaacgctttctggataaaccttgcggagccgtcgaagtcttcgccgtgcgcgacaaccgcgtcgatgaaaaggactcccgaaaacccgtccgtaacgccgtagtagtaaaacatctcccggcgcgcgtcttctaaaactccatcagcgttgattcgggagtttttccagctttctctttttgtggatcggacggcaaacaaccattccccagcagcgtccctatccaccgggtatagatattcgctgccgctgccgtcaaattgccatgcgtgattagcgtatttttcagttaatcttcgatactcttccctagttgtaatattgagttttcgcctgatgtatttcgcggtcgccggtttcaaagctccctgcgggattcgcccgtcgcgctctgccgctttaattgcgctctcaagtggcaacaccctctttttttccccggccatcgcaatcaatttctggtactcgcaagctatcttcgtatattcaacaagctcgttttctctcttgtcggctttataatccgagcgcaaagcgcgcttccggcctctcaatttcgcaatgtttcgcgataggtttctaggcgacatttttaacttcgcagcttccgccgccatcgccgcgcttcgttcgccgtgcggcgcggactcaacacgctccgccgcttccaatagttgccgtaccatgtctggactcaatctctctctccttttgtatctaacttaggaagtttgctctcctctggatgccagcccagcatatcatcgaatctcgacatctcattgcctacgcatctgatcgcgtccctgattcggtctctcgtttccgcattctcaggctgcatctgaaccacttctcgttgttcaagaacctctttcaacgagccgctaaacagcttcgccctctctcggagcacaacaatatacttaaacaacggctcgttcgcgctctcaagttcaagttcttccagcttttttattaacttatctttgtctgtttgtagttttctaaggctctcatccctgagatcgacgagctttgtttgcgtgctaagcgccttctttatgttttttataaaggccacaaattccgggcgcgggagcgcgtttgcttcatctatgctcaaagtcagtttttctgtgtcccccggctcctgaacaataatcttgtcgccctcgaatcggacactcggatcattcaaaagccccataatctcaagggccttaactgagtccgacatcttgcctataaaaaacacttcccggtttttgaaaaattttatatagttgtatccgcttctctcacatattcctattgcctcgcaaaatccttgaaaggcttccctgccgaagcgcgttttgacttcgttcagtaaagcgccttgcaaagccgtcagcttgtcaacctcgtggaagatcgtttttctttgcaagtctatcattctgcatttcgccgccgccgccgccagcacgtccggcccgcttcccggcggcaaaagcttttttacatccagaagttcaacatcggtgttcacgatttcggctttgtcgattgcttctagcgagacgttgttttcaccattcattgtgtgtttctcctatgttatattgtcgtatatcaactaaatgctaaaaaaagaggcgagcggcaaaaccgcttgaaaggaggtgaaccatgacccgcgtaatacccgccgcccgcctgtatcctgtgaaaacatgaacatagaggctctgttaaagacaggcgagatcggcgaccgccgaccccgcccgcgttggaggagaaacagaaaacaaatcgtctatatttagttatcacttttgccgtccttcattgccctgatctgctcccggagcctcataacacaccccgacagcgtcgcgaccatgctctcgatccgaccctcgaaagcctgtaagagcgcgtcttcagtttccagcgcggacagttcagcccggacttgacgccaccgtccccggcgtttccaattatgcaagctgaactcggaaacttccccatccactccatgcttttttatcaacatttggcaaactttcggaatggagccggtatcaaagtaaaaccgcgccgcgtcgccgcccagcctcgcgaattttcctttttccttgccgctcatcgttcgacctcgatcccgacgtttctgagttttataatgtcgcattctgtcaacattggttgtttcacattccaaaactcttcatagtcaattccggcaattcgggcgagggcgacgcgcatccaattcgacttgcgcttattgcaaatgacacgcgaaaccgctcctgtcgtaacaccgagcctttttgccgcctctcgttgtgtaagtattcctgcggtagccagcttgctacgcctatttcgctctaatgtcttactggaatgccacgctatcgtttccgcctgactgctcatacatactccctttgacgaggaaagctgttgtccattggcttgaagtgtgatataatcgctttggctgattgtatggtttgctttatgcagatttggcatactgtgattatagctcggtatactgtgggtgtcaacatgtttgccaaatattatttgcgtaaccaaacacgtgtgatttgaggtaaaagagagcgtggaagaaaaaaaaactccttcaaaacccaaaatgcctccttttgacaaggttgctattggtcagcgaattaagcaggcaagaaccgagttgggtttcactcaaaaagtgtttgccgatttgctatctgagtttttacagagttctaaaggggtttcctatggttttttatcacaggttgaaacaggtaagtataagcctagcgcggaattattatatgcaatgcaagctttttttaacattaatttatattggatttttcatggtttaggcgatgtttttatttccactgaaaaactactgccagaggatgaaaaccatccacaacggattgcttaccgttcagtgtttttattgatgaatatatcagacctaatcttttatggtaaatacgctaccaataaaatcaaagatttaaatgtacgtttggttactgtattatttgagttaaaattgaaaaacccagtattgtttgatttctttttgcatggcaatgacaattcagacatatttgataccttagaaaaaaaccaaaaaagattatatcttttagatgaggctgaaagagaagctttactttcagggtttttattagataaaactgatggcgaaacgataaaatgtccccctcgaaaaaagaagtgattcttccgatagtcggttccctctctatctatattaataaaagatgtcttctatctcgttccgctcatggctcgcccccggaagcttccgagtccccagctaatcccgataaacgtaaaaaaacgaaaaaataacccgaactcacaccctcaagatcatcccgttttcttgcagctcccttgcaaaatttgcaacaaatcttgaaatgctgcaaagcttttctccaaaatataccgcctcaccctcatgcccctctctcgattgtccgttttttgcaatgcccttgcaaaacttgaaacaaatcccgaattgttgcaaaaactgttttccgaaactcaccctcttacgcctcatacccctctctatatatacaatctcttgtctttaaatagtccatcgggcgcgccgcgcccgcccgcttcacccgccgtcaccatcgaaacaccgccatgctcccggagcctctggactcccgccgccagcccgctccccggcgacaccccgctttgctttcatccccgaaaccttcagccccgatccggcccgaccaccgccgccagcccgctccccggtgacaacccgcgccgcgatctcatccatcgggccgcgaagcgcccgccctttttactttcgtttccgaaacctaacggccccgatccggcccgcgccgccagaaggctcccgcgcccggcctgacgctccacaaaaaaaaggacggcccccgccgccacaacacaaaaaaaatattttcttccaaacccatcgaatactttcacccgcgcaaccaaattccccgacttccgaaagtccacaacccccaaatgaaagtattcggaaccgaagttatgacagaaccttacgttttttcagaccccccggtacatggtatcagcgaaatttatgaagccgtatttcttatcgccgaatccgggataaatcgtcgcgctaagacgttcctcgcatcttcagtcgtgtccgtgaaaaaaaaatgggggattagaacttgtaccctatgccgtcatactttgttccgtccgcggcaatgcaaggcgaacagcacccgctctgcccgtccccagcagcctcaaacagttcctcgcagtacggaccgcacgggcacggctcgtcaagatcatcgccttcgatatcaaaaatgcccgagccttccgcaacttgcatacttgtggccgtattatatccgctggtgttgacgattatgagtacggatcttttgtatccgagagcgacggagcatacgacgccgacgggtttatcaagaggattcagattggagagcaaagcgtagttccagccgggtttgtagttgccggagtaatcaggtccggaaactcctgaatattcgggggaacaaagctcgaacctctgttccgcagcgttgtcgtcccgaataaatgtcccctgaaaactgaatcctttttggcccagacattcgctgtcggacctgtcgcacaccgaagcgcaaagcccggaaggcgtgaaatccgccgagtacggatgcgacggcatcaccgtctgggcgacggccgtgtgcgaacaatccgcgtccgtcggaaaaaccttcattgccgtttcgttgatgtcgtccgtccttccgcactcagtcaaatcgacgatgggaaggaattccatcagggaagcgttgtccgtgccgatcaaggatctcacgggaaatcccttgcacgagttggcggcatcgttgatagccgtcttaagaacaagagtcgctcttatggcgtttctcactctcgttgacgcctgatactggtaatacgaaggcgtcatggcgcccatcaatatcagcattatgcacaaaacaacaagaatttccgccaaggtgaatcctttttcccggcgtcgcttgtttcgcattttttctccctgaatattattctgtttcaggcgcgcaataaaaaagcgcttcggctaactatggtattccccatttcgactggagtcaaacaatttgcccgtccgagaacgcgtgcgaatttgcctcataatgtatctatatcaataaaagtatacacccgcgcccaaaacactgtcaaacacagttcatttcagcggtttcgagttcaaagagcaaatgaaaacagaactaaaggctaaagattgagaatccgcgcaatccgctttcacgctgctggaccgcatttatcaccaatccgcgctggaactattctatgatatcaacccggcgggggactttatagggagcaagcgcagagcggagaaatttcctcagttcagccggttcagctgaggctccggagcgaagtttcgcttccgccataactctctctccgagggaatcgtccgggacgccgaagacgcggcagctttccaccgccggatgcgcgccgagcagcgcttccacctcctgcggatagacgttgaacccgccgacaagcacaagccttttcttatggccggttatgtatatatatccgtcttcgtctatgcgggctaggtcgccggagaacaaccaaccgtccttaagaaacatcgccgtgtcttcgggtttttcgagatattcgcgcatgacgttgccgccccggacgcaaagctcgcccgtatcgcccgtcgggagcgcctcgccgttctcatcgacgactttcacagttatgccttcaatcggcgggcctactgagccggctttcacaaactccctgccccgcatcgggttcaccgaagtcaccggcccgcattcagttatcccgtacccctgatatacatttgcgttgagtctctccacaagcccttcgtatagatcgtctgtcagaggagcgcctccgggaactatcgccctcacgaacgataggtcgctccccgccgagccgaatttatcaagcagccttttgtttatcgtcggcacgttcggaaaaacgcttatcttctcttttttaaggtccgccatcacgcgatcctctgaaaacatctcatgcagaacggtcttggcgcccgcgagaaaaggcagatgcagacatgtggtgcaggcgaacgcgtggaacaggggaatgacggtgagaaaagcgtcgtcttcatgcgccgccgccgtcgcgacgctcgaacgggcgttggtcatcagtcctagatgagttaggcaggctccgaggggatatcccctccatgcgttggtgtagatgatagcagccgtgtggttcggatctaggtccgcgggcgccggcgcggggaccgcctctgatatcgccttcttcatgtcgcgcttggccgggtcgcccatagaatcgctgtaaagcaacttcgttccggcgttcgcggcggcctccctgacgggcggctcgaacatcggatgcattatcgccagtttcgccgcgctatctttcagcatatattcaatctcgcgggcggaatacagcgggttgatagtgacgacctccaccccggccgcgaaggccccgtaaagagccacagggtattccggaacgttcggaatcgctatcgccatcctgtccccgcgcgacatgcccatctcgccgagcgcgcccgcaaacctcagcgcgtccgcgtaaagctgctcgtaccttatcactctgtcgtaaaaaacgaccgcgggccggtcgggaaaccgctccgcgctattttttagattgtccgcaaggttcataaaatcttattcctgttttccgggcgcgcgcgcacaccgcgccgcaaagcgccctttatacagtttccttattatgtgggtggaaattgcctctatcgaaaaaaaacgagggtcaagctcgcgatgcgaggtctttcaatagccagtcgacggcctctgacaggtcttctgcaatgaagtcgggttcgacgccttcgcgctccctgttgaactcccagtcgcctctgccgtatcccgtcaggacgagtatgcctgcggcgcagcccgcgcgcttcgccagcgccacatcgctgagcttgtcgccaatcatgtacgaacgggcaacgtccagtcccatttccgccgccgccctgtcaatcagtcccgtcttaggtttcctgcagtcgcagtccatcctgtaaggcggctctccggcggtcggatgatggggacaatagtaaatcccgtccagctttgcgccgcccacggccagcagctcgttcatgcgcgcgtggacatccgctatgagtctttcagggaaatagccgcgcgcgacgcccgcctgattggtgaccagaacagcgggcgctcctgcttcgttcagcttttttatcgccgaagccgacttttcgagcagcttgaaccggctgacatggttcacatagccgatctcctcgctcagagtgccgtccctgtctatgaaaacagcgggtattccgctcatcgcgcgcctcccggcagccgccgcgttttcaccgcgacctgtcgttttcctctataatatctttcatcctgaacacgagatcgagcgccttgcgcggagtcagctcttcggggtccgccgcgcggagcatttcctcgatgcggctcggaggctggtcgggaataagcgcgagttgcgccgtccgggcttcagggacttcgatgtccgactccgcttcctgagaaaccagaatttccgacgcgcggcgtatgaccgaggcgggtatgcccgccagtcttgccacctcgactccgaaactcctatccgtgccgccggggcgcaccttgtgcgtgaacagaatctccctgccccgctcaactgcggaaacgtggaagttctctatcctctcgaacaggtcggccatgcgcgtcagatggttgaaatgtgttgcgaatagagttctcgcgccaatcctctcgtgtatgtattcggagacggcccatgcgatgctaatgccgtctgcggcgctcgtgcctctgccgacctcgtcgagcagcacgaggcttttctttgtcgcgttagtcagaatcgtcgccgtctctaccatctccaccatgaacgtgctgaggccaagggtgatatcgtcgacagctccgaccctagtgaatatcctgtccaccacgcctatctccgccgcgcggcacggcacgaagctgcccatctgcgccatcagcgttatcagcgccacctgcctcatgtaagtcgattttcccgacatgttcggcccggtgatgatatgtatctggctcttcgagcaattgagcagggtgtcgttggggatgaatgtgcgcgcgggcatcgtcaggtccagcgacgggtgccggccttcttctatctttatcgtttccgacgcgctgacctgcgggcggcagtacctgttttcctccgccgcctgcgccagcgactgcaacgcgtccagcgccgccaccgcccgcgacgtcttcagcatccttccgatgtgccccgccagattgtcccttatcccgcagaacaactgatattcaagctcttcgagcctgctttccgctccgagtatcgcgaactctttttctttcagttcctctgtgtagaaccgctccgcgttggatgtggtctgtttgcgtatgtatctatcagggacgtttgccagattggccttcgtcacttcgatataataaccgaacactttgttgtagccgattttgagggatttgacgcctgtttcccttcgttctttttcttcgaggtcggcaatccatttccgtccgccttttttcagcgcgcgcagttcgtccacgcgggcatcgaagccgtcgcggatgatgccgccctcgcgggcggacctcggagcgtcgtcagaaacggcggcggcaaggtcggctcgcgcgtcttccagcgtgtccatgtcggcgcgcagggactccagcatgtcgcacttgaaagcggaggcgagggccgcgagcgcgggcagcgccgctagtgagtcgcgcactgccagcgtctccttgggcgtgattagcatggtggcgacccggctgcaaagcctctcgatatcccttacctcggaaaggctttcccttgcgccctcccgcgccgtcctgttttccagaagctcgccgacggcgtccagcctcaggtttatctccgccgggtcgttgagaggctgttcgagccagttgcgtatcagcctctttcccatcggcgtgagagtcctgtcaagcgcccacagaaggctccccttcttttccttctcgcgcatggtttccgtcagttcgaggttgcgccgcgtcgccgcgtccagatacatcccgtcgcggggccggtagagcgaaacggacatcacgtgcttggggtcggcgcgcaggttgtccctgacatagtccagaagctgcccggcggccattatcgcagcggggaactcctctatgccgaatccgagcagcgtcttcactccgaaatgcgcgcacagcctgtcccggtggtacggcgcgtcgaacatcaggtcaagctcggtgactttcacgtcgggaaaacgggccgatattctaccggcggcgtccgccccggaatcgcgcatcgccacgacgcattcgccgggcgacagccgctcgatctccctgaccagagacgaatcgtccgccgacctcgatatctcgcccgccttgaactccccggtcgaaacgtcgagtatccccagcccgaacctgtcgccggcgtccgccaccgaaagtatgtagttgtttcgcgatgagtccagcctgtccagatcgagatacgttccgggggtgacaaccctgacgacttcccggttgacgagtttaccggcgaccgcgtcctctgtctggtccgcgatggcgaccttgtgtccgcgctggatgagttttgccacgtaaccgtcggcggcgtgatggggcacgccgcacatgggcagtttgacgcccttgccgaactcgcgcgcggtcagcactatttccagttcggcggcggcggttttcgcgtcctcgccgaacatctcgtagaaatcgcccagccggtacatcaaaatggcgtccctgtggcgctccttgatggcggcgtactgctgatacataggagtggcgttcatacggcctctcccttcagggcgtgcggagacgctcccgtgatgcgggcaagcaactcatctcccggctcggccttaacgccttcgcgcacagtgaaatccactatcctgttctcccgcgtccgcccccgccgccgctctccgcccagagactcgaagaccatcgtttccgcgattccgcctacaaggctttcgttgatttccctcgatatattctcctgcaaatccaacagccgcgcaagccgcgacttcttggcgtcgagcggcgcgtcgtcggcctgcccggcggcggcggtccccggacgcggcgaatatttgaacgcgtacaactgatccacccgcgcgcgcgacgccagctcaagcgtccgctcgaattgctcttccgtctctccgggataccctactatcgcgtccgccgatatgccgcagcccggcgagtagtttcttatcatttctattgtttcgagataatacgccgcgtcgtatccgcgcctcatcctcctgagaatctcgtcgtcgccgctttggaacggcgcgtggaaatggccgcacgctttcggcagcgccgacagcccgcgcagaaactcctccgtcacccatttcgggtgcgacgttacaaaccttatccttgttacccccggcagatcgtggacggcggctatggcgtcgagaagggatcttttcggcgataagtccagcccgtaagcgagcacgttctggcctagaagaatgatttcccgcgcgccttcctccgcctttatcgcggcttccgctcgaacttgagccggagtcaggctggattccgcgccgcgcgcgtatggaaccacgcagtacgagcagaaattcgagcagccgcgcaccaccgtctggaaagcggacgccgggccgggggcaaacagagccgctcccgccgccaagccgggaaagttctcggccacagcctcccggatgatgtccgcgtagtcctgcggcctgcccgccccgacgacgtagtccacgtcgcgaatttccgcgcggatgtcggccagttcggcggagcatcctcccacgccgacgacgacgggcgcgccgccagtctttttgcgattgcgcaacacgcctatgaagctcagagccttctcctcggctttgcgccgcacgctgcacgtgttgacgtgaaccagcgaggcatcttcgggcgtcgccgcctccgccatgcccatcgagcgcagcatccgcgcgagcgacgccgagtcgtccatgttcatctggcaaccgaatgttttaatgaaaaatttgggagggcctgtctccgccatgaagatcagcctttcaactccctgaaaaagcaggaccatgctcctgtgtggcaggccccctcgccgctctgctcgacaatgaccagaagcgcgtcggagtcgcagtcgtacatcacctttttcactttttgaaaattgcccgaggtcgcccccttgttccagaactcgctgcgcgagcggctccagaaccacgtcgtgcccgtctcgatcgtccgccgcacggactcctcgttcatgtacgccaacataaggacgtccccgcttttttcatcctgaacgatagccgggataagccctttttcatcgaatttcaaatccatgtcgaaaccttctctcttggcgcaatgaggtcacagcctcatcgcgattcccctgtcccgcagatattcctttgcctgccttatggtgaaaatcccgtagtggaacagagaagcgaccaataccgcgtctgtcctgccgtcatgtatcgcgtcgtagaggtgagaaagctcgcccgctccgcctgacgctatcacagggattctcaccgcggtggagatggcgagattcaactcgttgtcataaccgattttcgtgccgtccctgttcatgcttgtgagcaggatttcgcccgcgccgcgccgttccgcctcgaccgcccagcccaccgcgtctatttcggtcggttttctgcctccgtgcgtgtagaccacccagccgtcgcccactcgcttcgcgtcgatcgcgaccactatgcactgcgctccgaaaatttcggatgactcgtttatcagactgggattcaggacagccgcagtgttgagcgacaccttgtccgcgcccgcgctcagcagttgccggatggtggcgacgttagtaatgccgcccccgacggtgaacgggatgaataccgtctccgccacccgtctgaccacatcgagcattatgtggcgcttgtccgaagaagcggtgatgtccagaaacaccagttcgtcggcttcggcttcctcgtatttttttgcctgctcgacagggtctccggcgtccacaaggttcacgaagttgacgcctttgacgacgcgcccgctgtcaacgtccaagcagggtattatccttttggcaagcaaaacgccctccgcgccgcctactgcggaaatctttcgacggcggccttgagatcgaagtcgccggtgtacagcgcgcgcccgatcaccgctccgtcaaggttcggtttttcaagagcggcgagccgctcgacatgctccacgcgggacaccccgccggcgcacaccaccgggatttccagagcgtccgccgcctgcgacatcatgtcgaaattcggctccgtcagcatcccgtcccgcacgatatctgtaagtatgattagtttagcgccgtcgtctcgcatcctgaggcacgcctctatagttactatttcagattcgtccgtccagccccggagagcgactttgccgcccttcgagtcgatggacaccgcgaccgcggcgccgaactcggagaaaagccccttggcaaaatcccgcgattcgagaacggacgtgccgactatgacgcgggaagcgccctcgtccagccagcgccggacgtcagcagccgaacggacgccgccgcccacctgcgtcctgattcccggcgacgcctcgaatatggcctttgcggcgtccaaattggaaaaacatttctggtcgagcgcggcgtcgagatcaatcacatgcagccacttcgtcccctcccgcgcccaccttatagccatttgctccggcctctccgaatacaccgtgcaaagctccctcttgccctgcgtcagccgcacgcatttgccgtccatcaaatctatcgccggatataaattcatcccttcgccatcctcccgaaattctcaagcagcttcatccccatcctctggcttttctcagggtggaactgcactgcggtcacattgtcgcgcgttatcgacgaaacgaactcgccgccgtaatccgtgacggtcatcgccagcgccgggtcctccggctcgacgagaaacgagtgcacgaaatagaagaacgagccgtcgggtattccatcagcgaccggccctctgttcctgaactcgagctggttccaacccatgtgcgggattttgaggtctcctctgaagcgagtcgccttgcccggaaaaacgccgaggccggggatgcgctctccttcttcgctgtagtcgaaaagcatctgcagtccgaggcatatccccaagaacggcttgccggatttgatttcagagacgattagccccgcaagcccctgcgattccaagtttttcatggccgccgcgaacgcgccgacgcccggaagaaccactcccgcagcgtcccggacgtcctttgcggaggtggtcacgcgcgcgtccgcccccacccgctcgaacgccttctgcacactcctcaaattgcccattccgtagtccacaatcgcaatcatgccaaatagtgtaggagttcgatatttatgtgtcaaacgatgacgtccgggcgcggcgcgtcactgattgagtttttctagggtttcaatgaatgagtctatgttgatgggtttcgaaaccgcgccgtccgctccgatctcgcgagcgagagcctcgatccgggcgcgcggcatcgcgctgaacaggaacaccatgggagccggagccgggccgctcttaatctttccgcacagttccgcgccgcttagccccggcaactgcacgtccaacatcacaagttgcggatcaaaagccgccatctcctcgaacaactctgtttcattcgacgccaccgcaacgtcgaatccttcggaaagcagcatcgtcttcaccaagtccaacaggtcgccgtcatcgtccacaaccagaatcctgttcaccctgcgcgattccacatgctccacagtctttagaatcggaatagtgaacgagaacgtcgagccttctccgggaaccgattcgacttttatccgtcctccgtgcgcctcaatgaactccttgacaatgcttagaccctttcccactccgtccgaaacaggatgcgagcctttcctgacttggaagaaaggcttgaaaatgttcttcaggtcagcggacgcgattccgatccctcggtccgaaacgcttatctccacgaaaccgtcctcgcgggtcgccgacacggcgaactgcagcctctccggcgtcgaatacttcaccgcgttttctattaggttgtccagcgtctgccgaattctgccatcgtcgcatttgacgatgacgcctttcagcgattcggacacctccttcttgaaggagtattccgacgttcggaacctgcgccggacgatgctctctatcataaggcgcgtttcgttcagccgcgcctcgaggaagttgtatatgttgatctcggccatatcgtaggtcgtcgttccgctctcgaatgcgtccagcgtgataagctcttcgaccagcttgagctgctgccggcctctttcgttgatggttttgattttctttttggcggcgtgcggcagatcctccttgagcaacatctcgctatatccgagtatcagcgacagcggcgtcctcagctcgtgagatattgaactgaggaagttaatcttttcctgctctatcctcttcctgtcggttatatcgcgcgatatgcccagcacggaggacacccgaccgtcgggggatttgatgggaacaagcctcgaacccagccagaactcccggtcgggaaactgcgtgacggtttctatgtagaacgattctccggattcaaaaaccctgtcgaggctctttttctgcctgtcggcgtccggcgagccgaacaactccgctcttgtaacccctatcgtctgttccggagtcatgccaagttgacgcgcggcgaaactattggtgtatctcacgatgtcgtctcgatcgactatgaaaatgaagtcttcggcggcttccgccagagtccggtatctctcctcgctctccctgagcgcctcttccgcctctttcatcccggttatgtccacatccatacagatgaactctttgtttccgtcccctacgtctatcggaaatatcatagaatacactacgacgctggagccgtctttcttgttgcaaatccattcggacgggccggaaggaaggttgctttcattcatctccttaagcagaatgtgaaaagcctcggttgccgcagagtcgagagtcgctccttccagagttctccctatcatctcctcggcggaccatccgaaaaccgattccgccgcgttgttccagtaaataacccggccctcgacatcgtatccctcgaccgccacgttcggcgtgttgcttatgatggcgtccaacctttgttcgctccgtttgagcgcggtttccgcttgatgcctcataagcgcgttggcgaatatctccgccaccaccgacagcaacgcgctgtggtccctcttccatcttcttctggtcttcaccgaatcaagccccatgaatccggaaagcttttcgttggaatacagggggaacataatcagcgacttgatgttttgcgcgttgaaaatgcttttttcaacttcagcgttttcaggaatcgcggacacatcgtctatagctatggtttctcccctgatgaacttgggcatcagccatttgagcgtttccaacggaatatttttgctgttctcaatctcggagctgattccctccgcgcaccattcatgcgtgttatcgacgaacaatccgtcgtcggtaagacggaacagatagctgcgatcgacctgcaggaattccccgagccttgtgagcgcgtcattcacggccgaatctatattctccgccccgacgcccacgaaactcgccgatatatccataacgacgctctggaagtcgaagttgtagcgcaacgcctcttccgcccgccttcgcgtcgtcacgtctctcatcaccgtcacaactctggcgacggcgtctttttcgaatatcggtatcttgcgggtctccgttattatcgtttccccgtcgatttcgttgatctcttcggaaagcatcatgttgccgctggtgaaaaccgatttgtattcctcccggacggagtcatcgagaaaagaaaaaacatcgaaaacgttccggcccgcgatgtccgtcggcaaaccgctttgcgcgttccattccttcatagttttgttgaaaagaacgatgttgaaatttctgtcgacgacatgaatcgcgtcggccatcgagtccatagtaagtctatacctcagttcggactccctgagcgattgttcggcgcgtcggcgctgtgtaatatcgcgcacgaccgatatgaccgtcctgttcggcgaattcaaatcgcctttcagcgagtgtattgcctcgaaatacatctccccgtccgcatatggcagagaatacgtcgcggcggatttctcgcccgtctcgaatgttttgttgaccgccttgtttagcgcttccgcggcttccggaggcagcacgtctgttggtttttttccgataaaagcctcgggcggcgcgtagagcctgtctgatctcgaagcatggtagccgactattcgcccttcaagattcacttcgaataatatatccggcatcgccttcagagtggtctcaaggcgatccctcgaatccctcagatcttcctccatgcgccgccggttcgagatttccttcctcaactcttcaataacttcgctgaactccgccgtgcgttccttcactgtttcctcaagcctttcttgatggctgagcagttgttcctctgccttccttctctccgttatgtcagtgatgaccgcgaaactgcctgaaaaccctcccacagcgtcgaaaagagggttggcagacacgagcgaatgcagaggcgagccgtcagaccgggtgaacgtcaactcgtattttccgccctcgccgagctttctccttgagaattgttttttaaatagggccaaattattcgcgtcgaggaaatttgttatcgactttccaacgactccgccgcgttcgcgcccgagcatttccaacgcgcggttgttcgcatacgtcatggctcccttttcgtctaacaccgttatgccgtcgtacatggtttctactatgagcctgaaatactcctctctctccctcagggcgttttccatctttatctgttccgtcatatctcttatgacgccctgatatccaacgaccgagccgtccggcccacggcgcgcggtcgcagttattttgcagtctatctcgcgtccgctcttgtgcctgagtttgacgtcgtaattcctgacggagccgcgggtctcaagcgcagtctgaagcggctcgcgatctctttcgtccacgtatgtcttcaacacatttctatttactatttcttctctctcatagccgagcagcgaaagcgccgcctgattggcttccagcacaatgccttcccgcgtcgatacgtacacagcgtccagagactgctcgaacagcgctttgtatctgtcctcgctctccctgagcgcctccaccgcctctttttgtctagtaatgtctatcccgaacacggtgattccggactgctctccgttttcatatatcgggaacgaattgttgatcacatgcctgatttctccagaggccgtcttgattcttgaaacgattatgtcctgtttccccgccatccctctggcgagcgtgtcaatctccattttcacatccgcaaccggcacgaactcggtcacgtgtttccccaaatcggccctcgtgtaaccgtacatctccagaacggcggtgtttgcgtatgcgacttttccctgcatgtctatttcaatcatcagaacggggatgttttcagcgatttctctgaaagctgccgagtcgattcgccccgacagacttgtcggaggcggatatgaagagttatcgggggacgattccagccgcgcgcgcaactccgcgacctgcttctccaactcttcgtatgtgggcttcttttcaggcatattcttattatattctttccggcttccgtcccgcgcgcggcctaaaatatcgcgcgctatctcaggaacataaacgccgaaatggcaaggcccgccacggccagcccccatgtccatgccagcgttttccgggtgaagacctgaacgtcctctcccagaaaacccgcgatccagacattgtgcgtgttggtcgggtcgctcacgccctgaatcatccccaccgagtagaacgccgcgactaccgccatcggcggcagcgcgccggtggaaatcattatcgccgctatccctattcccatgccccacacgttcaaaggcccccggtacaaagccaacggcgcgagcgcggtgaaaacaatcacgtagagaaccggcgcgctcggcgctatccgcctcatcacaggctccatgtatgcgccgaccgccgggtcccacacaacgcgtatcaccatgcctatccctatgattagcgccaccacgggagcgacgcccgttatcccgtcgaacaccgctttcgtcaacctctgaatcctgccgttcgggccgcggccggacacgatcaggcagtacagcattcccgcaagcagcgccgtgtttatcgggaacgcgtatcctgcgccgcctctcaaccggctggcaatgttgaatcccagaacgagagagagaggaataagcggcgtgagaaccgccagaatcccggcccgccccgcgtcccctgccgccgccgcgcctcctcccggcggaaccgcccagaaggatgtgtgaccccgacgtccgtgcaaaatgataaaaccgaggaccaccagcgcgaacgggatcatgaaaggcagaataaaacctatcaactgattctgagcgtcgatcgcgctcactgtcgagcttgccgtcattatctcagtgtaaaacttccagttgaccgggttcaacgctccgccgaggctcattccgaacaggaacagagagcctgcgactgcgggagtcacgccgatgctcatgaggatcggcagcattatagacgccaccataatgaccgctccgaggcccaccaatgacgagaataacagcgccgtcacgccggtcagcagcacgcacgacacgatcttgttgtcgccgcccagttcggacgcccatctgatgatcgtcgtggttgctccgctcgacttgagcagttcggcgagcgccgcgccgagcacgactgtaataaccaccggccacagcctcggcattccctcttctatcacaactctgaaaaattcccgcgccagaacgacggcgttcgatcccggatagctgaatgaaaggccgtggtagaaagctccgcccacgatgtacagcgtcgcggccatcagcggcaacgctatcagcgcgggcagtttccccagatacatcagcgccgcgaaagccagaaacactccgaacagagcaagccctaccgccatttccattcgcgttcacctttgttgattagtctattccgcgacttcgcggagcggcgagtctcatttctcgccgttctcggattgcggccccggataagacgatcttttgataatcaccgacgctatcctccgcccgaccatccgttccactttcatctcgtaaccttcgatatcgactgtctcttcctgtttgggaactttgcccatcgtatgaaaaatcaatccgcctagcgtttcgaactcttcgtcgtcgttgaactccgcgtcgagaatttcgttcagttccgcgatgtcgatcctagcgtccacgcgcaaagtgtccgagtccacccatctgtaaagaggctcttcggtgtcgtactcgtcccatatctccccgacgatttcctcaaggaggtcttcaatcgtcactagtcccgccgtgcatccgtattcgtcgatgactatcgccagatgcgtccgcttcttctgaaaatcatgaaggagatcatccaccatcttggattccggcacgaaataagccttgtggacgtaatctttcactgggtccgagtcgcgtccgtctttcagagcgcgcaacagagtccttgagttgaccacgccgatgacgttgtcctccccgccttcgtaaatcggaatgcgggaatgcttgtgctcttccatcagaaccgccatgcggtccaccgtagtgtccgccggagccatccgcatgtccggcctcggcgtcatcacttccctcacctgcgtttcgccgaattcgaccacgctgcgtatcatttctctttcagttttgtctatgatgccctgctctccggcatcgtccacaattcccagaatctccgactgggtgatgaacgggccttccgccgggcctgacttcccggtaaatatcctgagcgtcagattggctatcatcacgaacactttgcctatcggcgacacaatagcgtgaaacgtcgaaatcggcttgatcatttttatgaccacgcggtccgaactgttatatccgaccatcttcggaagtatttcgcagaaagcgattatcacaaacgacgccaccccgaaacttatggcgggaccgacccatgaaggccaatcagtgtgccccagcagttcttcggttatgttttcggtcattatcgcggccagcaggtttacgccgttaagacctattaaaatcgaagtgagcatgttgtttggtttggtcaaccagttgtcgatcgctcccgctcgcgcggggtgctcctctttgagggccttgagccggtgcctgctcatcgtcaccagagccgtctcggacgccgaaaagagcgcgctagccaacagcagtgcgaaaagaacaattatcgccagagtcattattttctcccagcgtcatattagaataacaaaaaatcaatgtcaaacatcgccgtctccgcgcgctaccgtgtccgccgtcaacagctccgcccggaataaacgcctcaactctacggctgtcaccctcgccgctcccgccgtcgcgctccgctgcgccaacatggcggacatgaattttatgagcggaaccgaaggcagcctgttgcgtttgcgcagacgagcaagaacgaaaaagaaaagaatcgctccgtgaaaaatggcggccctcaaaaatgcggcagctccaagcggcaaccccttcacggccacgccggtcagatgtatatacacttcctcgacgcccagcttccgcgccttgccgctcgtgcttgccgaatagcgatgtctaactttcgcgccgggcgcgtagaaacacttgcggcccgcaagagccgcccgaaggttcaaatccgtgtcctcgtaatacgcgaagaaattctcgtcgaacagccctatctcgtcgaacagcgatttcctgtagagcgccgcggccgcgcatggcccgaacacccgcgccggaaggttgtaatcccccccgtctctctgtccgcgcccccggttggagacggctccccacggcgcgtactcatcccccgccgagtcgattgttttagggtcgtcgtaaaaaactatcttgcacgcgaccgaatcgaagccgtgattagaatccagcgccgcgaccgctttttcgagccagtccgggtctggaaccgcgtcgttgttcagcagcgccacgaactcggtgtccgccgcgcggatgcctttgttcaccgcgcgggcaaatccctcattggcgctcgattcgattaattccacgtcgggatgattgttttttattatttcgcgggagccgtcccgcgacgcgttgtctatcacaataactcgctgcccgcccagagtctggctcgcgagcgcgccaagacattcgccgatatatttctctccgttccagttcgggatgacgactgtgacgcgttgcgggttgtccatcgagttcgcgctccggcgcggcgcgggcgttccgccgcccttgcctgccgtgttcaggttgttcttctctgcggctgtttctgtatgcccgtcatcagctccaacagatagtccctgtccatagacttgttcatcgcgtcctctttggtgatgatgtttttcttcatcaactcataaagggcttgttcgagagagagcatgccgatgttctttcccgtttgaatggaagcggggagttggtaggtttttccgtcgcggatgaggttgcgcagcgcccctgtgggaaccattatctcgaatgctgcgacgcgcccgcgccctgccgccctgcggaccagagtctgcgagattatcccctcgatgttctgcgacacctgcatccttatctgcgactgctgttcgggaggaaaaacgtcgatgatgcggtcgaccgtctgggccgcgcccgtcgtgtgtagcgtgccgagcacaaggtgccccgtctcagcggtggtgatcgcggtggaaatggtctcaagatctctcatttcgccgataagcaccacgtccgggtcctgtctgagcgcgctcttcaacgccgccgagaacgaccctgtgtcccgtccgacttcgcgctgattgacgaggctcttcttgttctggtggacgaactctatcggatcctcgatcgttattatatgttcttcgcgggtcgcgtttatgtggtctatcattgccgctagagtggtggacttgccgctccctgtgggtcctgtcactaggataagcccgcgcgggcgctcgcagaacttcttcaccaccggcggcaggctcaagtcctctatcgaccgaacttttgtagggatgactcgcagcacggcggccttcgtccctctctgatggaacacgttgacgcggaacctcgccttgcccggatagtcgtacgcgaagtcggactcccacgtctccctgtattccttcgcgtgctcctcgtcgagcatgctgtttatcagctcgtccatcgtctggggcgtgagtttcgccagattcgtctgaagcgcgattttcccgtctatcctcaacatcggatggttgccgactttcatgtgaaggtcggacgcgtcgaactggagcattacgtccagaagctctcttatatgcatctgctgttatcctctgcccactagtttggagaattcagggacgttctggcatttcgccaccgcgtcttcgaacttgacgagccgtcgtttcatcagttcggccaagtgctggtccagcgtgtgcatcccctgctccttgccggcctgaatcgcctgatgaatcatgaagaccttgttctctcgaataagactcgatatggccgagttgatgaccattatttcatgcgcgacgacgcggcctttccccgtcgccgcgggcacaagcgtctgagacaccacgctttgcagagtcaccgaaagctgcattcttatctgctgctgctggtgcggcgggaacacgtcgatgaccctgtttatggtctgaaccgcgcctgtcgtgtgcagtgtggcgaacacgaggtgcccggtttccgccgctgttatagccatcgagatcgtctccagagtgcgaagctcgccgacgagtatcacgtccgggtcttcgcgcagcgccgagcgcagcgcgcggtcgaacgacttggtgtcctgcccgacctccctctggcagacgctgcagttcttgtccctgtgcagaaattcaatggggtcctcgatagtcaggatgtgctctcgccgagtctgatttatgtggtctatcatcgccgcaagagttgtggacttgccgctgcccgtcgggccggttacaagtatcagccccttcgggcggtctgaaagctcttccagagtgtccggcagcgccagttctttgatggtcagtatttttagagggattgttctcagcaccgccccggtaagcccgctctgcttgaacacgtttacgcggaatctcgacactcccggcagactgtatgacatgtcgcactcgttcgtctccacgaactcgcgcaactgcctctcgttcatgatggatttcgccatcacgtccacaatctgcgggggaaggacggagcgcgggtcggcagggcggagccttccgtccagacggaagaacaccgggctgttccctttgaaatggacgtccgacccgttgtgctcggccagatacctcaggtacgcgttcagcctttctttcggcgctatgttctcttcgagcgaaggcagtaccggctgcggtttctgctgttgcggttgcggtctttgcatcgacatttttctatggcctcaaattctgcgcttccgccgggcgcgtctcgcgccgccttcggcggttatttcaaaaatcgtccggccgacagtcttacgctgtcagcgccttcaacacgctgccggccgccgtctcagagcctctcagcggccgcagatatctgtccttgtccagcttctccagcgtgtccctgctccagaacgagcaagtatccggcgtgagcgccccgcacacgcggaaaaagtcgttcgagtccttcccgaattcgagatagtaatccgccagagcgatcccgcgcttgtaaagaaacggctgcagagccttgttgacttgagccgccctcgttctcatcgtcttcacgtcgccgtccgtcacttccgtgtagacgcgcgcgcgcatccccggctgaaactccttgaccgcgtccatcttcacgttgaattcgattatggtcacagggagtatcgagcctgcggcgagacgcgtgcgggcggcgaactcatctgaaaccatgttgcgcaccgccacgcgggccgggattatccgcgccgcgacggtctccatctcggactcgcccgtctcgcgcgcgaaatgtgtcgccactccgcaatcttcaagcctcttgaagagcgcggcggcgatcttcatgttcaacgcgcctttgcccggaaacatgggcgacctttccgcccagcattccaccgcgtcgttcgtgaactcgaccgcgaaccggtcgggggacgcgtcagactgatatacccgcatccccggcgtctctcttatcaaagcgcctttccccatgtctttaccccgcgcgggctattccttcgccttccgcgcccgcgctttcttcttcgggaaaaatctctcgtatatttcgtccacgtgccttatgaaatactccacttcaaaacactcctccaactcggcgggtttcaacagcgccgccacttcggcgtcagccgacaacagcgacttaaactccgccttctccgcccacaccctcatcgcgttgcgctgcacgatgtggtacgcctgctccctcgtcggctcccttgcccaccagcgccagcatcacccgctgcgagaatatcaagtcccctcgtcttgttgaggttttcaagcatcgcgtccggatacaccaacagcttgtccagaaggcgtttcagcctgaccagcatataggtgaagcagtatgcaactatccggaattatcaccctttccacagacgaatgggtgatgtcgcgctcgtgccagagagccatgttttccatggcggcgtgggcgttggcgcgcaacacgcgggcaagcccggccagacgctcggctgtgatcgggttcctcttgtgaggcatcgccgacgagcctttctggcccttcgcgaagaactcctccgcctctcgaatgtccgttcgctgaagcccgcgaacttcggtggcaatcttctcgatagtgccgccgaccaccgccagagtcgacatgaactcggcgtgcctgtccctctgaatcacctgcgtggcgataggcgcggccttaagcccaagccttcggcaggtgtcttcttcgacatcggggggcaggttcgagtaagtgcccaccgcgcctgaaatcttgccgacagatatcgtctcgcgcgccctttcgagcctttcaaggttgcgccccatctcggccagccacagcagcatcttcattccgaaagtcatcggctcggcgtgtatgccgtgcgtgcggcccaccatgacggtgaatttgtgctctatcgcgcggcgctctaaaatgacgcggatttccttgacctccgagatgagagcgtccgcagactcgcgcatgcggagcgcctgcgccgtgtccagcacgtccgacgacgtcatccccacgtgtataaatctcgagtccggcccgacattctccgccacgttcgtcagaaacgctatcacgtcgtgatcggtctctttctctatctcgtctatgcgctgaattgtgaacgccgccttctttttgatcgtcgacagcgctcgcgcgggaatttttcccttcgcgtgccacgcctcgcacgcggctatctccacgtccagccacttcctgaacttgttctcttccgaccagatcgagcgcatcggctcgtatgtgtacctgtctatcatctcgtcgaaccgccctccgaaaagtagttcctgtagcccaaagtcctcaggcgttcggatttcttaattacagcctcagcctgctgcgccctgaacctgctgtagcgcgaggcaagctccggcttgcccagagccagtatctgaacagccagcagagccgcgttcttgcatccgcccacggccaccgtcgccaccggcatcccggcgggcatctgagctatcgacaacagcgagtccagccccagcatcttcgactccatcggcaccccgatcaccggcaggttcgtgagcgccgcgaccactcccggcaggtgcgccgccgcccccgccgccgctatcatcacttttccgccattgttgtcaaacgtcgtcactattcttttgacatagtcgtgcgtgcggtgcgccgacgcgatatgcgcctcgtacgacacgccgaaactgtccagcgtttcaaaacacgccgtcatgcttttaaggtcggaatcgctccccataacaaccgccacatccggggcctgcgccctcttctgcctagcggcggcctttttcttcttttccatttatcatttttctcccttgagagtatttattctggattttctgatgtttcttttcggagaaaccttcggcagctcgtcctccacctccactcttatcgacgccacgccgtccaaagcccagcccgtcagcttgcccgctcttccgcccctgttccggtcttcgtcttcatactcttcgtcgtcttcgtcgtccggcccggagaaccctaatgactcgatgttcgccacaagctcgttgttcatcggacgactcgaaaactccttcaacacttcatccagacttttctccttctttctttcgcgaaggaaatgagggtctttttcgtcttgtctttcctgcccctcgacttggatttttatcagcaacatttccggagccgccgacggaagctctctggctccggagaaaacgcttatcaccgcgcgtccgggcgctatgtcggctggcactttcaaccatattttttcctcgaccgtctcgctcctaaacggccgcacccccactttcagccccagcttctgtccgcgcttcaccacgggcggacttgccttttctttgtttgccttttctccagccgcgttcggctctttttcttcggctttagcttccggctcggcggcgggctctttttcgcccgtcttcgtttcttccgcttccggcttctcttcgtccccgccgtctatctccactttttctataagcgcgtaagagttcctcgaatctatctcgacgttcaggttcaacttgcgcgcttccgcgtccgcgtatttgttgtccttaagcaattgaagcgccgtcacgaactccaccagagacaacgccgcgatgtcgtccccgtcgtaaaacatgttttccctttcgaccggtttttcgcaggccgagcatcctatggaaaacgacactctggaggttcctttgccgagcctgtcgatggtgttgtcgagactttgcagcgcggccatcgccgccagattgctcaacaaatcctcgtcccgcgccaccttgaacgaatacttctccgtcttgccgatatctccgtcagtgacggttatgtcgaatggtatcagcagaggaaaactgtccagccgtcccacaagagcggggccgcggtcctgagttatctctcctcgcagcgccccggtcgcggcggctttgaacgacatgtcagtgcctcgcgccaccgcgagcaccggcgcgtccgccagcagataccttacatcgcccttcctgaacagcggatgcccgaacatcagggcttgcttgccgtccacgtgcgtcaccgttcccgccgctgacacttccatatctcccgtcagaagcagcacggccaccgaactgccgggttttatctccgagccgggtccgattacggtgcgtcccgttttcgccccagcccatgcgccgcccgcgtccgtcacttctattcccgttccctcgaatattctctttgcaaaaggcatcgttcgcgccgtcaccccgcgaaccatcgccggagccgccgccgcgctcgcaaataatgtcccctctatctcgtccctgccggattcataacttattctcgtaaaaacctttccgccatgctcgaaaggcgcgtcgaactcgaccgtcccggccctcggcgcgtcatactccgccgccttcagcatggacgcgatatccgtaactcctcccagatggtggtccgtcatcggaaacgtcattgaaagcgcgccgacaagcctgtcgccgatatatatcggggaaccgctcatccccattgacactccgccgtatttctcgcgctccggcccggtcaactctatcagtatcagcggccccccgctgaccccggcccccggcataactcctttaactttcaccgggaatttcgatatctccagcccctcgaacaccgtcagcccgtatccttccattccgggcttgacctctgacgcggacatatacgaaacagccggagccgccccggcgacgcgcgtcatcgccccggaaacgaccgtcacaaaaaccgccagcgctccgagaattatccttgcttttgatttcatcattatgttccgccgcgaccgcgcgcctattaaaaatccgcgtggcgacgcggcaacaatctcaacatcaatacctcgcgcgcagttcccgtcgcgcggttaagtctgatattatatctcattatcaaatcaaattaaaacccccgtccgcctctccccgcgccctcttttttcgctccgatggcgctatccgccggaaatatgtaaaattccatataagttgtcaggcttttagccggctccgggagatttgttcatgattatcaataatttcaaagtcgaaggtttcaggtccttgaaaaaactcaacctagaccttatgcctataaacatcctcatcggccccaactccagcggcaaaagcaacataatcagcgcccttgaacttctttccgacgccgtctccggcaaactccgcgacgccattatgaaaaaacacggcggcatgatccccattctttggaatggaaccgcaaaggaaatcggttttgaggcaacaatacgctctcatcgttttggtttcaacgaaaacccggaagaaaacgcatccgatttagtgaaaagacgatatgtttatagtttaaaacttgaacaattgagagcctcaagcgaatatggcattgaattagaaaaactccatgtcgagaatattgccaatgatgatgatttatccaattacacaggcacgattattaacagagatggaaaagaatatttcacgaaagaaattaatagcgatattccagcggctgtgttcgatatttttaaagatagcgaatccatgttttttaatatggattcaatcaaaagtggatggaaaaattatactgaattacaaatatataggttcatcaatttttttaatgactgttcattttaccgaaatctgaatcatggcccggaagcagcggctagacattcgactgtcgcgaggtcggaaaaggtgttggaatcgaacggcgataacctcattgccgtccttcacactctttacaccggcaataaagagttcaaagaacagtttaacaacactctcgaagcggctttcggcgacgactttgaagaactgacattcccgcctctcgaaaacggcagaatctatatgaaatggcgctcgaaaacgcttaaacgcgagctttcacccgccgacctgtctgacggaacgattcttttcctgatgctttccgcgattcttctctccccggaacccccgccgataatctgtatcgacgaacctgaacttggaatgcacccttctatgctcggcatcatcgcggagcttatcaaagacgcgtcaaacagaactcaacttattgtttccactcattctcccgaacttttaagcgccttctccgacatgccggaatcagtcgtggtcgtggaaaaaaaagacggcgcgaccactgcgaaaagactcgaccgcgattccctttccaaatggctggaggaatacaccctcggcagattatggctcgatagagaaatcggcggatgatccatgaaaatacttcttttcgtcgaaggcgataccgaaaacaaaacacttcctgattttcttaaaaaatggctggattccaagctggacaacaggatcagcgtcgaacctattgttttttcgggttgcggcgattatttaaaacgcgccggcaaaaaatctcaattacatcttgataatagcgaagtaatcgccatcttcggcttgctcgacctttatggattgcccgaaaagtgcaaaggcggaaacactgtcgatgaaaaaatcgattttgcgagaaaaagaatcatagaatctttgccggaagaatgcagacctagattccgccagcatttcgccgttcatgagctggaagcatggttgctcagcgatcccgatatattccctcgcgggatcaaactgccagttgaatgcggaaatccggagacagtcgacttcgataaccccccggcaaaacttctcaaggaactttttaggaaatataaaaaaaattacagctataaaaagaccgttgacggcgtcaatctgtttaaaaaactctcgcctaaaaccgtgcggaaaaaatgtcctaatttcaagaagtttaccgatgaaatactggcagccgccgaaaacgctcagaagcggagccttcctcgttgaaatcggaggccggcatggatgaaatcatgactcagtcgacaaaaaagaaaatcttcatcgtcgcgggggcgagaccgaacttcgtgaaagtggctccgattatgcgcgcaatggcagaaagcccctccctgcgccccatcctcgtccacaccggccagcactacgaccacaatatgtctcagagttttttcgacgagttgaacatcccccggcccgacgttttcctagaggtcggctccggcagccacgcggcccagaccgccgccgtcatggtagccttcgaaaaagccgtgctcgaattaaaacccgacctcgttctagtggtcggcgacgtcaactcgaccctcgcctgctcgctcgtgtccgcaaaactcatgataccggtcgcccatgtggaagccggtctccgcagcttcgaccgctcaatgcccgaagaaatcaaccgcgtcctcaccgactcgatttcatcttacctcttcgtcaccgaaccgagcggacgcgacaacctcctgcgggaaggcgtcgcggaagacaacattttcttcgtcggcaacgttatgatagacactctggcggaaaacgcgcggcgagtgaagaacggcgaggcggtccgccctctcggcgatttctccggcgattacgccgccctcacccttcacagaccctccaacgtggacgacccggcgacattctcccgcatcatatccgcccttgaggccaccgcctccatagctccggtcttttttccggcgcatccacgaactgtcaacaacatccgcagattcgggctggacgaccatttcgcagcgtgggacggcgcttcaattcccgccggaaaaatcttcatcatggaacctctcggatatctggaattcctctcccttaccatgaacgccaagatcgtcctcaccgattccggcggcattcaggaggaaaccacttggctgggcgtcccgtgcgccacaatccgcgaaaacaccgagcggcccgtcaccgttgacgtcggaacgaacatcctcgtcggctccgacgccgaaaaaatctcccgcgccgccgccgccgccctgcgcggcgactggaaacagggccgagtccccgaactctgggacggccatgccgcctcccgcatcgtctcaaaactggaatctctgttatgttaagtttgtatcaacatcgccatacatctggttttcatcgatctaagaaaaaagccgattttgcaaagaacgaagttcagcaaaatcggcgaccaagagtttttttcggaaggggcgcggggaaacctgttttttgcaaaaaaatggtttcaccgcaaattactaaaaatctattatccatatattattttttccctcgctgacattgcttttcaataatgatacaatacggttgcggaggaatccgcgcgctatattggcgtacccggaatgttttcgggcatgtttaactgcggcaggttgtcttatagtgtctgatttgctgaaaagaaaaattgttattgcggcggcaacggcattggccgttctcgcgactctgtccgccgctgtgcccgcgcgcgctctcaacctccactacacaatcaccgcaaactacataatgttcgacatagaccgaaaagtgatttactgcgacggacaggtcgagcttcttcacggcaaccttcgctttcaagccgactcgatacgggtggacgtgaaatcgcacatcttctacgcagaaggcggcatcgtcgcttccactatgaagaaatccgcttccgcgctgccgggcgacacggcttcgccgtccaccaaccctatattgacggacattgaagaaaccggcgacctgctcgaccagcgcgtcgaagctcagatcacaggcatggacggcgcttcattttcaggcgaccaacttaagttcgacttggatcgcgcggcgggcatcctcactcaaacccaaagcggcgtcaggactttttatctggtcggcgaagaactcaacgagacggcccaagagcctctgatgggacaggcgttctacatctacgaagagccttatctcaccgcaaacgccgtgaccgccgcccgcatgcgcatctatcccggcgaccagtacgaagcgtggcgcgccaccatgtgggtaaaaggcaacaaagtaatgtccctccctttctggaccaacaccagcaaaaaatacaccaccggcaaatggcgcatccggaacgtcagctacggctcaaacgcggactggaaagtcggcgccaacgtgcgctacaaggaagcccgcgacttcaaaggcttcgtcgatttgaactaccacggggacagctcgaacacatattccgcggacctgcgacagtcgttccgcatgaacacccagacaagcggccagttcaacatgcgcaacctgttcggcggagacaggggctacaccatgtccatgtcgcgctacgccgccggcatgagatcgcaaacccttcagatggactacgacctttccggggcgaaaggattccggctcggagccgcgggcggcattaagaaaaccagaataaacggctacctctcaggccgcagaactggagacggcgactacggccaatcatccatgaacgccctcgtcagcttcgacggcaacagaaagttcgtcaatggcaacacgcggggcgtcggctattccgtaagctctcacataaaaatggacaacttcgattataccgacgccgtgacggcggcctacaccaccctcaccgccgtcagcccttcaatcgccctgtcaaaaaagaccagcattgattggaacacagccaccgggcttggcggcgacaccgaaggcaggcccagcgcccgcctgtccgcctccgcccgcatcggccacagaccccggcagggaatgttgattcaggcccgctataatttcactgacagcagatacaccggctcctccaccgtcaaacgccagcttatgttgtacgtgtcgaagtccaaagggcttaagtggaattccgccctgtcggcgacttatgacatccgcgaagcaaccatcagcagcctgtcttccggcctcgattacaccgtcaacaaaaaatgcagactccgcacggacttcatttacaatctgaaaaacaaccatttctccaccaagaacttcaacgtcgactacgacctctacggcacgcgcatcaacacccgctggttcgccgacaccaacgatttcatgatcgacttcacatcaaattactaagccggatttgcgcaatactgttcaataatcacaaaaataggagcaatagccgaagcgccatttgattttacccattgcgccgagcgccgctcccaaccatattgtgaacgcatagcgaaaaacggggacttgcagcgctgcatttcgcgacgggtgtccgtttttctcaaagtcaccgcccattgtttcctgttaatatcatgtagacaatggctaaacataataaaataaagcttatagacgcaacaacctttatggcaatgtttacatcttgttcatcaagatatgtttgcttaaacgcaatgttttttcttcttgtcttgatcgccaacgctaaatagtatttaataaagacaaaaagatttataattaaaacaatcaaagcaattggatttatgcaaagcttaaatgatagatcttcatcagacacatctcttgtgagcatcataacgaaccatgccacaataacatttacaaatgctaaatttttaaacgcgcgatgtcttttctttattacattgtatgccacttcgataataaccgctgttaataataacaataagaacaacattgctaatatgcgccttcacaattataatctgctcgattttctcttttgattctaaaatacgtttctacttcgtcgatgacttctgtaataacacgaccagtcgccattattagccaccagttcttttcgttctgcccataatggatgcgcgatggattggcaaaaacccaaaatggtcattcacccatttctgagcgagtcttggtcatgctttacggtcgattcggttggttttccgggctgctttcgccttccttcttttcctgatctttgatctttccaagaaattcgggaaggctgactccagccatctcgcagacatcgtgcatcgcaggcagcattttcgtgaaactgcctaaccagttggacgctgtcgagccgccgccattgccgccgccgccgcagtcccacactacgatcttgtcgaatttaatgttgcttatcgcttctgcctgcgcttttacgatttccggcaactgctccactatgagcaacatggcggctttttccgcgtcgccgttcgcggcttttaccatctccgcgaagccctcggccttcttctttaggatttcttggatgcctgccgcttctccgctcagccgctctcttatttccgcgccttcaccctgtcctttaagtgtttgttgttcctttatcgcttccgattctatgattaatttttctttttctatctcagccggcacaaccacatcggctttgcgggtggatttttctctatcagccctagcttcctccgcttttttctcggctatgtaggctagggtggcggcctcggcggctttggttttttccgcggcgacggcctttctctctgcttcggcttccgcttctcgtctgtcagcgttcgagttggcctcgactactttagcagtgttctcgcctttaatggcttcggcattggcagtggcaacgttaacgcgcatctgctgttgcgcgttcgcttcgccggttttgccgtccctttcagcatttgcaatattaacgcgcatctgctgttgcgcgttcgcttcgccggttttgccgtccctttcggcatttgcaatattaacgcgcatctgctgttgcgcgttcgcctctccggtcaggccgtctttttcggcgtttgcaatattaacgcgcatctgctgttgcgcgttcgcttcgccggttttgccgtctctttcctgctgggccacttccaccttggctttgtttatagcctcggcagccgcttttttccctaacgcctctatgtatcccgattcgtcggagatgtcggtgatgtttacattgattagcttgagaccgagcttctcaagttcagattcaacattcttcattacttcttcttcgaacttttcacgtttcgcattgatctcttcaatactcatcgttgctatggtagcgcgaagttgcccgaaaataatgtctttggcattttcctcaatttgctccttgctcatgctgagaaggcgttctgcggctaccgtcataaccgatgggttggtggaaatgcctattgtgaatcgggatgggacatccaccctgatattctgattcgacaacgcgtttttcagaccgatgtcgattgtcatcggcgtgaggtcaagatattcgcaagcctgaaaaagcggccagacgaacgctgcgccaccgtgtatgcacttcgacgtttgacccttcgccactttgccataaacgaccatgatctggtccgacggacaccgccggtacctagtcatcgcggcgagcaaagtcgcgaaaagcacaattgctactacaacaagaccgataagcatgtacatttaataatcctccgcaagaaacattatttgattttttcaatcaccaaggtttgatccccgaccgtctctattacttttatctgttctcctttatttagcctatctccctttgttgccgcatcaagctctaccagtcttccctgaagaacaatattgacctttcctctgccattcatgttttcgggcactgctatcgttacagagccttcttttccgacggcgtttttcagcgacagagttccgctgcttttcatggaagaaagccctttcataagcagcatcaccaacgctacggttacaactccgcaaacaccggcgatgattaccgtgatcgacttcgacaagcctttctccaagcaggccaaaccaaaccaagagaaaccgaggaaaaacgccaccatgtttctgatggtaaaaaaaccaagaaataaatcgctatgcgtgtcgctgcccggatctacatctccggagtcgatatcgtcgccccctgcgaaagtgaatatgagctggagcaagaaaaacaccgagaatacaacagcaacagcccaaaataccttttcaaaagagcttaatgcaccccaccatgcttccatttttcaccttcacaaataaggatttcacctaacattattcgcaaacatctaaaatgtcaataaatgagcctgtcattttgccttgatgtggtgtctgtagtgataaagctattcctgcatttcaatatttccatcagtcaccccgagatgaatcagagcaaaaccgggaaccaccacaatgctaaacaactaaaattgctagaatatcccggtacagccgcctatttacgcctcctttatttttgctgttctcgcatggtgttactataccatatcgggcggtcttgttgtcaatcgtcttgagcttccccccaaaaactggacagaggtttaaggtggaaaccgtggtggtgtagaatccagttttggagggatgagcgatgaggaagaaattcaccccagcgttcaaggccaaggtggcgcttgaggcgctgaaggggcagaaaacggttgccgagctggcgaagatttacgaggtgcatccgaaccagatcgggcagtggaagaagaaggtgctggaagaattgccgggtgtattcaacggcaagcgggccagagaggacaaaggccgggaggagcatgtgggggagctttaccggcagatcgggcagcagaaggtcgaattggactggcttaaaaaaaaatctggacttgccgactgagcagaaacggcggctgatcgacccttcgagagaggcgctgccggtgtggcggcaatgcaaactgatgggactggcgcggtcgagttactactacgagccatgcggggaaagcgagtacaacaggagcctgatgaagctgattgacgagctgtacacggagcatccgagtctggggtcgccgaaggtcacgaagctgctgcgaaacatggggcacgaggtgaatcacaagcgcatagagcggctgatgagggtgatggggcttgcggcggtgtatccgaagccgcgcaccagcattcccgacgccgcggcccgcaagtatccgtacctgctggcggggctggcaatagagcgtcccgaccaggtgtgggccacggacatcacgtacatccgcatgcgcacagggttgcgtatctggcggcgatcatggactggtacagccggtacgtgctctcgtggcggctgagcattttcatagacgcggcgttttgcgtggaagcgctggaagaggcgctttcgcgcggatggccggagatattcaacagcgaccagggcgcgcagttcaccagcgaagcgttcacaaagccactgctggacaggagcgtcgccatcagcatggatgggcgcgggcggtacatggacaacatcttcgtggagcggctgtggcggtcggtgaaatacgaggaggtttacctgaaggattacgccgacgtatgggaagcggagcgtgagatttcgagatatttgcgctggtacaacgaagtgcgccctcaccaggcgctgggctacgcgacgcccgcccaggtgtactttgaccggagcgtcgaaattggcccgcagggcttgcgaaacagcgcggcgagtgatattgtggcggcgtaaaagaaaacgcgccacagaggaatggaggggcgttttacagagagaaaaaccgcccggcgacaggaggtggcaaagcaaaacaatcgaatgcggggacttgggaaaactcctcgcgtgtgagcacacgtacacgcgcgcgcgcacgcatgatgcgtgcgtcaggaacaggcaaagtcaaaggcaaaagactaaaacctacaccaaaccccaccttataaacccccattttctgtccaaccaatggggggaggttcctctgtcgctctttgggttgataataatagacgtctgttctttgatagaaacatccgatggttatattttttattgcgcatcagttatcataaaacaaaattgagaagtttgggaaaagggggttggggaaagaacccttttcaaagggtttttccccaatcgccaaaagcgacagtctcttgtgtcggtttatcaggattatacagtttttcggatttatacagtttttcaggtttagaccgggtcaaccgcgtcgccgagcagcgcgcgggaaaattcggaggcgttgaacggcagcaggtcttccatcttttccccgacgccgacgaacataatcggcatgcgccattccttgagtatggagaatacgaccccgccgcgcgccgttccgtccatcttcgtcagcacgagggcgtctatcgggacggcctgtccgaactgctgaacctgattgtatgagtttcttccgatggtggaatcgaggacgagccacgctctgaagttctcgaccccggctttttccaccgccacgcggtggattttctggagttcgcgcatcaggttggattgagtgtgaaggcgtccggcggtgtcggctataagcaggtcggcgccgcgcgcgcgcgcggcctgtatcgcgtcgtacatgaccgccgagggatccgcgccctctctctgccttattatcggcacgtccgaccgcttggcccatatctcaagctgctcggaagccgccgcccggaacgtgtcgcaggccgccagcatcaccttgcgcccttcggctttatagcgcatcgccagcttgcctatcgtcgtcgttttcccggagccgttcacgcccatcatcatgacgacgttcagcccgggggccaaaggctccgccgcagcgcccgattcgagtatctcggagagtatgtccacgatgagcgcgtttagcgcttccgcgtccggcgggcgtttttcgaccgctttgcttttgatttcatctacgatcagcgcggcggtggacgcgccaacgtccgacaacagcagcgcttcctccagcctctcgcagaactcgtcgtctatcttcacggcccgccctatggcggctgatattttatgccgtaagctgtcgctggtcttcttgagacccttcttcaatctgtcgaacatggttgttattccatggataccgtaaggagcttcgagtatccttcctgtttgtccattgttatgccgaacaattgatcggctcccaccagcgttcctttgttgtgggtgacgaccagaaactggctgttggtcgaatgttttttcagcatttcgcggaaccgcacaatattgctttcgtcaagcccggcgtcaacctcgtccagcacgtagaacgggctgggtttcactttgagtatggagaaaatcagaaccagcgcgcaaagggctttttcgccgccggacagaagggttatcgccctcatcctttttccgggaatctgcactgaaacgtccacgccggattcgagagggtcgccgtcgccgacaagcatcagctccgcctcgccgccgccgaacatctcgacgaacgtctcctgaaacttctccctcacccgctcgaacgtctccatgaactgcgctcggctgcggtcgtcatactcgttcactatgtccatcagggtcgcgcgcgcgtcttcaagatcccctatctgctcgctgagcaggtcgaatctgttggacttctcctcgtattcgccgatagccagcatgttcaccggctgaagcgtctcgagctcttttttcagcgcgaggtagcgtccttttccggccgggccgccgtctgcggtttcctcaagcgcccgctcctcggagacatcgtcgaactcctccgagaactgccttctgatctcttcgagttgcgtttcagcgcgcgcgcacttcatctcgctgtccagcatcgcttctttgagttcttccagtcgggtttcaacagcgtgtatctcgccgcgcagccgcaggctttcgtcttccatgcctttgagagcggtccgtttctgcgcgagcgcggattccgcggcggcgcgcgcggccccaagctccttcgccagcgcctcgcccgctttcatctcttcggaagtccggagcctgtccgccgacagcttcgacttctccgcgtcgatatccccgcttctccttcgcacccgctccaactccgcctgcctgtacttctcggcgtcgcccgccgcctctatctcccgcctcagttcccccatctcgacgcgcagatcaacctcgcgcatctcccgtttcctgaacgcgtccgctatctcgtccagccccgactgcgccgtcttcaactcggcttcgaggctctttctcttttctgaaacttccttgaacttcgattcgagcttggcgacatccgactctgagccgcctccggttgacgcgcattcggccagcgctttttccgccgattctaggtctttcgtcagaatttcgacgcgctccacagccgccgccgcgcgctcgcgcgccgcggccagttcgatattcagtttgttaaattcttttccagacgcttcggacgacgacctcagcgacgcgtatttcttttcagcctcttcgcgcgcggcgcgggccgccttgacttccgcgttcttcttttcgagttcggactttagctcggccacgcgctctcttgcggcctcgctggtcggcagagcttcgcccgtgaacagcgtcccgttgataaaacacgccgctccgtccgccctcacaaccccggctcccgaaggcagttccgaaatcgcctctttcatctccgcgtcggtgtcgacaatcgcgaacattgataatacattcagcaactcgttcggcgctgcggatttgaccgaaaccgcgtccgacaggagccgtttcgcccattttttctttttgagagccgccgcagccgccgccccggctcctgagaaccagtcaagaatcagcctcgcggccccgccgtcggcggcctcttcgagcgccttccctatgtccgcggacgtcgaaatagaagcgttgaaaagctcgttcaaagcgcggcgcgcggcaggctcgaacccggttttgatctcaatctcgtcggcgagccgggcggtttgtttccctttttcgctcacggccatcaggcccgctacgcgttcgatagcttcgacccgcgccgacaaagcgttgcgctccgcgacgaccgcatcaagcgccgaccgcgctttatcccgcgcggcggaagtttcctcgatgcccgcgcgaagcttttccgcctgcgattctttttcgcggatttgtttttcaaattgcgaaactttttcgctctcggacttgccgcgttcccgcgccgccgacagcctgtcccgcgcggaatcgcgggcggaggtcagagacttcactcgcgcggccatccccgcaagcctgtctttcgccaccgccagctcgcccgcaaggctcgcctccagcttcttcaaatcctcggcttccggcagaagcccgtcgcgcttctctgtcaggtctttcctgttcagcttcagatcgtcggaggattgttttgtggcgttttcaagttcggcggcggcttcatcgagcctgcgttttttctgctcggccttcgcgcgaaggtctaatatgtctttttcgagatttttctcctgctttacgatatcggctttttcgatgtcagcggcggcggcccttctgtccgcgtcttccaccgcgcgggccagcagcctcgcggattcctccgcgcgccccagtttcgagccgatgtccgccaactcgcgcagagccgagtcgatttccgcccgcgccgcgtctatgcccgcacccacattctctctggactgtctcagctcgccgactttcttcagcccttccgccctctttgccttaaggccctctccctcgacggaaagctgttccaagcggctcttcaaacgccttatctcggacgcgaaaacgcccagcttcagcctttccatctcctcgactatctcgtcgtaccgcttcgccttttccgcctgctctttcaaaggccccagcgattcggagatctcggtcagaatgtctttcagccgggagatgttgatgttcgtgtctttgattttcgacagcgttttggttttttcgattttgtatttatttatcccggcagcctcgtcgaatatctcccgccgctgcgagggggacaagtcgatgacgtactcgacgtcgccctgattgattatcgaatagttcgtggtggacagtccggtgtcgatcagcaactcctgaatgtccttgagcctgcaagactcgttgttgatggcgaactcgctctcgccggatttaaagtaccttcgggttatcgagatttcgctttggggtagcggaaaatagccgtcgtcgttgtcgaaagtgaggacgacttcggcgaagccgaggggcttgcggctggcgctgccgtgatagacgacttcttcgagcttgcggccccggatcgagcgcatgctctgttcgccgagcgcccaagttatcgcgtccaccagattgctttttccgctgccgttcgggccgaccaccgcagtgacgccctcgcggaactcaaagaccgttcggcgggcgaacgtcttgaatccgaacattgacaccgatttcagatacattgcgggccttgttgttttttatcgtctcaggagccgtcggcgctcatgccgagtatcgccgcgcgcgccgcctccgtctccgcttcctttttgcttcgcccctcgccggttccgtgcgaggccccgttgatgaagacctccactttgaacatcttgcggtggtccgggccgttctcggatatcataacatatcgagggagagtcttgtggcgtttctgagcgtattcctgaagttccgtcttgaagtcgcgcgcggcctcgccgcccgcctcctcaaggaactcagacatccgctcgatgacgaaatcgcgcgccctctcgaatccttggtcgatgaagacggcccctatcagcgcctcgaaacaatcgaccacgaacgccgtgtggtctctgccggcagactcctcgacgcccttgccgacccggatgaaatctccaagctcgattcttcgcgcggctttcagcaaaacgcctttgctgacaatgtgcgccttggccttgctcatcgcgccctgatcgtcttccggaaaagatttgaacaggcgttcgcagatggaaagagctagaacggagtcgccaaggaattcgagccgctcgtagctgcgttcaagccgctcgcgttccggcagcacacacgaaccccagtacgacggatgcgtaagcgccgccctcaaacccgactggtcgttgaaatccacgccgatgattcccagcaagtcctcgagcggcctcgggaatccttctctgtcccgaacttcgaggggggaaaggttcaacgggtcacacctgccgttttttcagataatcggcggcgtctcccaccgtgactatcattaccgcgtcctcgtccggcacttctatgccgaactcgtcctcgacggccattatcaagtcgaatatcttgcgcgagtcggctccgaggtcgtccctgaacgacgcctccatcactatcctgtcctccgacacgccaagctccgccatgatcactttcttcaggcgatctatcatgtctgacatttatcgtcctgcctccgttatccctcgactttggtcacaagaacagtcttgcccttgtagtagccgcatttcgcgcatgcgcgatgcgtcatcttcacttcgtggcactgcggacattccgtcagcgtcggcgtcttcaagcctcttttccactgcgccttctggcttcgtgtgctcgaacgcgatttcttatatttcggaagcgccatcttctttcacctcccgctccatttttctctctaaaaactttcttccttctttcaccgtgctcataactttgtgcaatgtttgctccagattgtcaagcgtctggagggcatacatttccgcgccggccccgacgtcccctttgccggccccctcaggcgaagacattttctccgccgtcgcccttgccgagtcctcttccgcctcggcctccatctctatcctcatcgacctcatttcattgagcgtcgcgtatatcttcttttcgtccacaacgatttttcctataaatgaaaggaaaaaaccgctgtccagatgcgattccagcgtgtccagcaacttctgaaaccttgccagtttttctttcttcaatcccggcccgccttccctagtcgccttatcccgctctcacttctttgaatatctttccttcagcttcgcgtccaccatcggcgacacaagagaactcacgtccccgccgaaagacgccacttcctttattatcgaggagcttatgaaagaatgctccgtgctcgtcaccagaaacaccgtctcaacgttcggagccagtcttttgttcaccagcgccatctggaactccatctcgaagtccgtgaccgcgcgcagcccgcgcacaaccgctttcgctccgcacgccttcacataatccacaagcaacgtgtcgaaactctccaccttcacattggcgatgtccttcgtcagttccttcgctatttccatcctctcctgaatcgagaaaagatgttttttggacgggttgttggaaatcgcgacgataagctcgtcgaacaccgaggccgatcgctgcactatatccatgtgaccgttggtcatcgggtcgaaacttcccggatacgccgccatgttcatttttcgatgtccttaatgtttttccagaccgtcacccagcttgagccgtaccttctggagtcccgcattgaaagacttccgaactccccgcaaaccggtttcgctccgtgctgtccgacaatcctgccgccgtccgccagcatgtccgccagccccggcgattccatcgtcgcctcgaacatccccccgtcatacggcgggtcgaggaaaatcagatcgaaaattcccctcgccgcccctccggcgacgtattcccttgcgtccatccttataatttcaaccttgccctcaagcccgaatttactgacgttgcgctctaccagtcgtatcgctttcgacgagtgatccacaaacaccactctctccgctccccggcttaacgcctctattcccacactccccgctccggcgaacaggtccagaaaccttgctccgtccatcggcccggtcaggttgaatatgctctccctgactcggtcgtatgtgactcttatgctgtcgtctccatcctccgggccgaacagcttggatctcttcaaatcgccgccgattaccctcaaaactctctccggtcggttgcgcgcctaacccggatttttcgcaagaaaaacccggacttgacaagcgcgtctgcccgtcggacatccgcgcgaatccgtataatataacatatttatatattttatctagtatataaaagaactattatttttctgactctgccagtcaaagcacggttcctgcgcgcgcgcttgtaatctcatccttcataacggcaatttcgccgtttacaatcaccgcgtcgaacccgcacggatatctgacggggtcctcatacgtggaattatcccgaagcgcgtcagggtcgaacaccactatgtccgcaagataaccttcctttatcaatcccctgcgggcagccccgattttccttgcgggcatagacgtcatttttcttacggcctctcccatcggcatcagcttctctccaatgacataatgcttcaggaacctgaccgtcgtggagaacagccggggatgcgccttcgccccctcgtccgtctccaccccgtccgatcctatgctgctaagaggatgcgacatgatgaaccgcaggtcgtcttcggatatgaattcgcccgcgaccggggcgttgctgaaaccttcttttagaagcacatggagcgcggcggctttagcgcccttgcccgtgtccttcataacatccgccagcgtgcgcccctcgtactgcttcaattttttcagttcgaggaaaatcaccttttcctccatccccggctcgttcagcagcatcgtcgtggcgagtatgttggaaaacgccgtgaacggatagacatccgcctcgacgtccacgccgcgcgcgcgcgcctcctccatcatcttcatcgttttgcgcggcttgccccagtttcggctcaggattgccttgtgatgcgatatctgcagagacactcctgtttccatcgctatcccgattgcctcccggttcgcttcctcaagcttgtctatctcgtttctcacatgaacgctgaacagcgcgccgcgtttcgccgccgtcccgcagagagccttcacttcttctctcgacgaaaacatctgcatcggatacgccagcccggcggaaaaccctctcgcgccttcgtcaagcgacttatccagcaacgacttcattgcttctatctgccccgcgttcgcttttaacggcgaacgccccatcgtcatctgcctcaaattgccgaacccggtctgcagaaacacattcgctccgattccgatccttttgatatgttcgatatacccggcggtggaatcccattcaaactgacactctgttccaaacatgccggagaggtatcccctgaaatccctcctcagcctgtcgttcatcggcgctccggaaaaaccgcacgagcccacaaccgctgtcgtaaccccctgcctcagcttcgcctccattgagccgttcacggctatcttgaaatccgaatgcgcgtgcatatcaatgaagcccggacacaccatcttgcctgtggcgtcgatggatgaaagcgcgggatcatccgcgcgggccatggcgctcgcctcgtcgcccacagcctttatcgtatcgccttctatgtagacgtcgctcctgacgcccggcccgccgaccccgtcaaaaactgttccgcctttgatgtatatctttccttccatgcgctaatcccccgctatttcggacggcgtttccttcacttcgccgctacgccgttatatactatatccgattttatcgacactgcgcgcggagagataaaatgtcacaacaaaccgaaagagagcttgtttcgcggctcaataagaacatatccacaaaaaagaaatcccccggaaacagacgctgcgtcgtcggcttggacggattcatagacgagatagtccacgtggtggacacccgcaagaacaactccgaatacgagcggctcgaactgatgtccaactacgccgaaaggataaaaagctacgcgggcaagagcggcaacatagagtacgtgccgcagcgagtgaagatcggcggcaacggcccgattatggcgaacgccatcgcctctctcggtgtctcgacgacttatatcggaacgctcggcaggccggatatccatcctgtctttcgccccctgaaagacgccgcaaacgtaatatccatcgcagagccttgccatacggacgcggtggagttcctcgacggaaaaatcatggtgggaaagatggcccccgtatcagacgtcacttgggacaggattctggaggatgtcggaaaagagcgttttgtcagattgctgcaagaggcccacttgctcgctctcgtcaactggagcatgctcccgttcatgtccgacatctgggaaaatatcatcgcggaagtctgcccgaaactttccaaagccggcgaccgctttttcttcatcgaccttgccgacccccagaaacgggagttgtccgacattaaaaggatgttgagcatagttccgaagttttcaagttgctataaagtcatacttgggctgaacggacgcgaggctgggcagatagcgtccgcgctcggcgtctccgccgacgcttccgggccggacgccgccgcccgcgcctgcgaggaaatctcccgcgcgctcgacatctactccgtcgtggtgcatcccgtcgaattcgccgtcaccgtcgtcgacggcaaaacctaccatcaggacggcccacacacaaaacgccccgtaatcacaaccggagccggagaccatttcaacgcggctttctccctcgccctcgctctcggaaccgatccccaaacggccctcctcatgggcgtgtgctgctcaggctattacgtgatgacaggcgagactcccgacatggacaagctgttgtcgttcatgtccgactggcgggacgaccccttcggcaaaatgtgaagcgcgcctcttctgatgttgccaataatatacccgacatccgcccgtaggtggcgacccgccgggttgcccggatgtgcgataaaggaaaaaggcgacagcccaatcagcgggcaattcatgaattgcccctacagctaaaaccgcaattggcaacgtttgtcattaggctatacatgttattaaatgattccacccgctaccaagcgcgccatgcgcaaacttttttctttgcgcattatgctttttaccaaaatagttaatgggaaccttcattcaattcttcgtatatacgcgcaaacgcatttgtgacaatcagcatttattgccgccattcgcctcggatgcttttgatataataaaaaaggggcggcccgaaagccgccccttgcgtttcgcttgtgcttcttaaaatgtcagcccagcagcttcgagatcattccggctgctttcttcggattgagaagatcgcggcgggaagccattttgatcttctgctgtttctccctgtccgcgtacatttcgaacatctcttccttgtagtggaagacctgaatgtagttgacttccttgtaatcgctcgaaatatgagcgtccgggtagcgtttcttggcctcttcgacgcgctggagggcgagtttaacaatgtcctcgcgcttgccgaattcgagcgctccggtcgggcaagtggtgacgcacgccggctgcaggccgttcgtgatccggtcgaaacagagcgtgcacttaacgtacggcgctccgtctttttcctgtttcgggatgttgtagccgcaattcatcccttcgaccttagctgtccgctcattgtatatgacggcgcccgtgtcggtgatgacgacggctttgtcatccgtgccgtcggcgatcatcttgcaggccggctctatgcagtggcggcaggagtccttgaagaacgtccagatgattccgaggtctccgccttcctgttccttgaatctgaccacggtgcgggtctggtgagaaaggtcgggcgggttctggtgggttcctcggttgttcgtcttttccgcggcgtcctgattccagttcttgcaggctttctggcaaccgcggcaggcgatgcatttcgaagagtcaaaaagttttgcgtatgccattcccgatcaccccttcctttctatattcaccatgaacgccttggattcagggatcatggtgttagcgtcgcccacggtgggcgtgagcaggttcgcggtgtctccgccgttttcaggcgcgcaccagccgaagtgccatgtggttcctacctgatgaacggtctggcctttgattgtgaaaggtttgaatctcgatgtgaccatcgcgacgacgtcgatctggccgcgcgccgacttgattgtgaccatttcgccgttctttattcccttgagggcagccagctctttgctcatctcgacgaagttctgcggagccagttcgacaagctgcttgttccagcgggtcatgagtccggtctgccagtgctcgacaaccctgtacgtggagcaaacgaacggatagcgcggatcgcaggtcaaataaacgtccttgccctcgccctcgcccttttcgttgaacagcttgacggtcgggttgattctctgtccgctgaaagcgttgttctcgaccgggcattcgagcggttcgtagtgttccgggaacgggccttcggccagtccgggaccgaatatcttgcctactccttcccatgtcatgataaaaggcagtttgcctttttctttgtccgacatcgggggagccgcgttgtccgcgatgtctccgacccatttggctccgtcccacttgatgacgggcagttcggggcggcgcgggtttccgtcgaggtctaccgacgcgcggttgtatatgatgcggcggttcaacggccagcaccacgaccagttggagtaaagcccgatgcccgacgcgtcgttgttgtcccggcgcatcatcatgtttccggcttcgggataacttccgctgtacagccagttgccgcaggcggtcgagccgtcgtccttgaggccgacgaagttcgtaacctgcgtccccttttttaacacagcgccgtccgctccggccacgtcctgcgtgtaatagccgttaacctcgcgggctatcttgcgagagcttaggtgtccgttttcctcgtaatcccacgctagtccgagtatcggggccgggaatgctccgccttccgtcttgtatagctctttcaagcggtgaatgaggccgtcgataatctcggcgtccggcatcgcttctcccggaggattgacggctttgtagcgccactgcgcccaacgtccgctgttgctgatgctgccttctttttccaccgacgccgcgcagggaagcatgaacaccgcggtctttatcttgctcgggtccatccccgggcctttccagaactgtcccgtctcgttcgggaacagattcacgttcaccagccagtcgagttcgccgagagctttgcggacttttccggcgttcgcgctgctgcatgccgggttcatcccccacgcgaagaatccggagaatttgcccttgctcatctggtcgaacaggttaagccacgagtagttggctcccacatcgcccttcggcagccagccgtatccgaaatcgttttccttcgtcgctgattcgccgtagaatgccttaagcaggctgaccatgtacttcggggtgtggctccaccagttaaggctctgaggctccgccgtcgtcggcgtggtggccttcaggaagtccgccagcgtggcttgtgtgccgagtgggaacttcagatagccgggcagtatgtggaatagaagggcgaagtccgtcgagccttgcacgtttgactcgccgcgcagcgcgttcacgccgccgccggccactcccatgttgcccagcaacaactgaattatcgacatagtcctgatgttctgggttcccaccgtatgctgcgtccaacccatcgcgtacaggatggttccggacttcgcgggaccggatgtggaagtgtacgtcttatagacctttaaaagctcgtccttggtcgtgcccgtcacttccgccactttgtcgatgtcgtagcgggaataatgcttcttcagaagctgatatacgcagttcggatcctgcatcgagggatcctttattaccacgccgttggcgtctttctgatacgcccacgtcgccttgtcataattgcgtttttcagcgttgtatccggagaacagcccgtcctcgaacttgaagtccttgttgattaggaacgaagcgttcgtgtaattctggacatagaacttgtcgatcagatcgttgtccagaatatacttaatcatgccgcccaagaacggaatgtccgtcccggagcgaaggcgggcgtaaatatccgcctttgaagacgtcttggtgaaacgcgggtcgacgctgataagtttcccgcctttctccatcgccttcgtaacccatttgaatgaaatcggatggttttccgctgcgttgcttcccatcaccaacacgacatcgctgttgctgaaatcgatccagtgattggtcattgctcctcggccgaacgactctcccagagccgctacagtagccgagtgtcatatgcgggcttggtgttctatatacaccaagcccaaacctctgaggaatttttggtagatgtagcactcctcgttgtccagcgcggcgctccctacggacgcgattccttccgtgcggttcaccgtctctcctttggcgttcttctcggcaaaactcgcgtcgcggctcttctttatccgctttgcgatctcgtcgagcgcccagtcccacgacacttctttccattccttgccgtacggctcgcgatacaacggcttagtcactctgtcgttgttcaccgcgaggtgatacagcgacgcgcctttgctgcatagcgcgcctcggttgatcggagcatccgggtcgccttcggtgttgattatcttgccgtcaacagcgtgcaccaagatgctgcaactgaccgaacagtacgggcagatggtggttgttaccgtcgcgccttttgtgcgcaactctgcggcataggctcgggaactcttgaacccgaaaccgattccgctgagcgacagtccggctaccgtcgcgcccgaaactttcagaaacgttcttctggtcagcttcatgtgtgtgaactcacccctctcataggatttatttttaatcaaacaaatacacctttagcttacacagtttcttctcataaccacttcaaaatacccacgatgaaaagaggtgtcaatagaatgagaaattaatagaaatctatgtcagaaatgacatagattttcaaaataatcttttatctatttggatatttgcttatgctatatttaacatagcttcgacgtatagttcaccgagcgaacatcctaacaacgtctctccgggcgcgtccgccgatagcacgcaaccatcctctatcgtgccggggccggaaagtattctcgcctccggctccaccgccacaagcctgtctcctgccactccgtggacgattatcggctctttcgcgccgaccgggagcgtctccctcaattcgcagaactctatccttgtgatctctccggggtcggaatgaatgtgaacggcgtaatccctcgcgcctttttcgtccacaaagaaatgaacgaagttcaagtcccgctcccctgtcctgtccggcggcgcgcccccccctcctaattgtatatatataattccttctatttcttccctttgcgcgctgtgcttgtgcccgtaacaaacatactccacgcccgccttctggaacatccctatcatcctctcgacttccttttctctttcctccaacgttgtgttccttatgtacatcgggtcaagcatgcttcggtttccgtagaccgggaaatggaaaaaaacgaacctgtgctcggcgggccgcgcaagctgctcctcaagccactcccattgttcgtccggtttcggcccgtccatcctcaacgttgcgtcgttgtgtttctgcgcgttgtcgagcatcagaacctgcgtgtccccgtaattcaccgcgtaataaagattgcccatccgctccctgtacagcttggtcgacaggtagctgtcgtggttgccgattgtcgcaaacagcggagcttcgagtttcgccgtctcagtttcaaaaacgttccattgcgctggttcgtccacatccacgttgtcccccgcgtttaccacgaaaaccggtctgcgcaagttgacctgacggcgcacgcgcgcgaactgctccgtcgccccgtccgcccccagatgcgtgtcgctgaaagcgataaagttcagtcgctcgccgggcgccgggttgtatgcggtttccagaactgcgcctcccggccgcgaagcgttcgccctcagcgctacgattccatccgactcccggatctccgccgtctcgactccttttcccgaaaacgacagcctgcctgcccggacattcgccagttcgattctaaacgcgtccgtccccgccgctcccccctgaatcctgaaccccggctcgagcgatgtggcgcgcactcgggcgaaaccctctccgcgctgacgcacgaacgccccccgcgcggatatcctcagttcctcgctcgcgcgggcgccgccgaacggccatgccgccatccccgccgccacacccgctcccgctgcggccatccccttcaaaaaatcccgcctcgtcatttctttcataaagcgctcccatttttcgtcagaaaagcttccggttccgcgcgcacggcgcgacaaacaatgaacatctctttgactcgtttttcagcgaaattccatcttcagccgtcgctcgcagcttcttctattccggcgaatctgtttctcgttcgacaggctccggggaatccggtttgaaccttgctttgttgattacgaatataaaagtgtcgccctgaatgaaatagggatgaaacaagtccggattgtccgccgcccaatatgcttccaccggcgtttccactctcccgcgcgcaaactcgcgcgttaggaatagaacgtccacatcttcctttattaatacagcaagccatgcgtcgaaatcgggatatcccctgaagatgtgattgagccaaaccgattccgagggcggcttgtagccggggaacgagcggaggtctttttcatagtggtgaaaaacagcgccctgcctgccgtccacattcgcgtatatcaccctgtttttgagcctgtgtccgtatagtccgtacggcgaacagttgccggaatacgcgaccgtcaaagccgagtcgatggaattcagcgcccgccatcctgacgccagataatgagcgccgtaccaatcgtatctgaatctttccatgtggccggatttgtaagggagcgcgaaatacagagccgcggcggccatcatcgcggggacaatcgcgcgagcgggttttcgtcccgccggggcgaaaaacgccgccgcccccgcgagcgccgccatagcgaacagcgcaagcgccggagccgcgtttgagacccattccggcaacccggccccgccgaaaaacgcgtcccgcgcgaacgcgccgaaacgcgtcgcggcccctacgttgcccaacgccaacgcgcccgcgaccacccaccatcccctttcccacttccccttccacatcgcaatccctatccctatcgcggcaagcatcagacccggagccagaaacctcgcgttattctcgatgttgtaagggttcacatgccagaacaggagaaataccgccgggactagcgcgataaccaagcgaacatgcggcgcgcggcgggttttcaacgctgcggacatcagcgagaaaaacaggactcccgataccagcggaagcgcagaagccgccgaagccggcaaaaaaccggggtaacgcgcctgcgccgcaatcgcccccgctgccgccgcgaacgccaccgcgcgcgccgcagtcgccctgccgggagccgctttcagcgcccccgcaatcagcgccgcgccgaataaaaccgcagccgcgccgccgccgagcgcccgcccgaccactatcttcccgaacgcccccatgtccgacgcgggtatgtgcaggtatgaccggaacatcgccgccctctcgaatgccccctcgaatattttccatccgaatatgtccagccccatcgggtagaacgggctgcctgtcaatgaaaggttgcgcgcgtaccagaatatgcctgcggctgctgcggcggcgaaaaatgcgtccgctctggacagaacttttttccatgactcgccgcgcgcgcgcgccgccaccagcggaaccagtagcgccagcatcaccgccccgaaatacttcgagccgacagccagccccgccgctagacctgccatcagcatgtcgcctttcgcgcgcccgccgtccgaccgcgggatcaaaaacgcgactgcggccaagaaaaatgccgtaaaataaaggtctattccgaattgaagggtttgcgcaagaacaattgggactgcggaacccgccgccgccgccgtcgccgcgctcttcggcggcatccccgcccgcagccctattacgtgcgccgcaagcgccgcagtcagcagtcccgccgactccatcagcccgcacagcaggtcgtcgttcagaggcagcatcagccacagatacatcagttcgccgttccccggatagtaggtcgtcgcctgttccgggcttagcgtctgaacgaaaactatctttcccgcgtgcagccactccgccggaaataccagatggtccagaaaagcgtccgtgggggcaggcggcatggtcagcgcaaacgagcacatcatcaagaaaaggacggcggatatgattttcactgcggccatcgccgcgcccgccatcgcgtccggctccgaatgcggcgcttcgccaaaagaaagaacgtcaggggagtaaaccgcccgcgaagatttcgccttgacgcgcgccgccgcgacaacaaccgccagaatcacgatctgcgccgcgaacgcgttcgggtacttaatcgcgcccgccatagacaacaggagcagggtaaaagcgaccgtggagacaaaaacgacgcaggcggcaagcaaccgctcaggcccgcgtcgattccccgtcagcaaccccgacgccacccacgccgccgccgctgctggcagattcagcgcgaacagcctcgcgatgtcgctcagattttccattgttgaattataccaattatttcatccgaacaaacggttttttatatgacattgaacataaactgcggaattccgctatatttcgcttgctggcaaatatgcgcctctgaatctcttcatatctccctttttctttgtttattattccggcggcgctgttaattatttcgcggtttcgtgtaaaccctgaggaatttcggtaatatagtaatgagggacaaaataccggataacatgcggcaagggagttttccctcggaacggaggcggaggctatgaaaaagattgtggcggcggcgatgatagcggcggcgatgatagcggcgtcaacggtcgcgacctttgcggctgaaacatacaacttcggcgtttacatggggccggacgagcgggaccagcagcttaaaaccgttctcggcgcggtggtcaaatacgtcgccgacatcgagaaggtcgatatgcaactcaaatggtacgacgacgaaaaggccttcaccgacgacgccgcgaaaggcgttctcgatttcgcgttcacaaaaaataccgatccgttttttcttctggccactaaactcggctatgagccgatacttggcgtgtcgcttttcgacaagaaaaccgcccggatgtgcctctactcaagctcggacacgaaaatcacgggcatcgacaaaatgaaagacctgcgtctagccacctacaaggaacacgacggctactatccgctccgcaagatgttcggagacaaaattctcgatgggcttttcaaggaagtgaaattgaacagcaacggcatggcctcgctcgacatgcttgcaaaaaaagaggttgacctcgcccttgtgcacgagatgaacgtcttttccctcaagctgttcaaccccgccatgataagcaaactgaacgagcttgtttgctcggaagcgacagttcagccggggataatgaaacacaagaacgcccctaccctgctagtcaacaggctgtccagcgtgatggaaagcgcccacaagtccgaaaccctgaaaccctacagaagccttatgaaaacaacaaaaatacgctttttccccgttaccataaaagacttcgacccgctcatcaagctatacaccgacgcggcaaaaagcggctgggataaagactacaataaatggctggccgccgctaaaaaatagttcgccgatataaacgacttattatttgaaattactcatgaattgttgctgttttcgctcacgcacaaaaaaaacattttgtgcatggcacacaaacgagtgggtaaaatcaattaagaactggcataaacgcgttaaatgaaactgccgtattcatgcttgaacccggctttatttatagacccctgagaaccgggccatttttatagcggcacactgcttctcacgcacaaacgagcttgtgagcgccgcccatgtttgtttttctgtaggggcgcggtttccgcgccctatcatggcgttgttccgggcggggcaaccccgcctctactttgaataacgcgccttgcggtccgcatttcttccgctttgaacattcgctcccgaatcctaatgatggatccgggtttaaatgaaaactccaaatctgcacatggtattatttgtagcgcacataaataatcaaggaaagaagcgggattttcaattagtattccgacacagtcgccgaatttgcctttcattcccagagcggcgaaaagcgggcacaggcatcgctggggcgcgcgctgccagtccccgattttagcgtgtaaatgtttgccgggcgggtggaacatagcctgctttcgctcgcaggacataacaattccaacaagaacaatcccaccccctgccgacattccttttttactgtccgattaaatatttttcaaagacggcaatttgacgcgcaataatgtcacaggcaacgagtagaatgcatgacaaggttgtcgcattctaattgattgacaaaaagggactatgtatctgatataataaggcggctatatcacataacaggaggcaacgctatgtttaatttagtagatgaggaatggattcccgttctatggaacaacggacaagtaagcgccatcggcattaaggaagcgttcacgcgagccggaagcatacgccagatagccgcgagcaaccctatggaccgtttcgccatcatgagatttctattggccgtgctttattggtgcaaaggcaacccgacagaaggtgaaacaaaattgaaaggagattcatttcctgccgaatggtttgaaaaacttgaagcggaaaaagactgtttcaatctgctgggagaaggaaaaagattttttcaaaatcaatcagcgaataggaagaaatcaacaacggaattgctccaagaaatacctaccggcaacaattttcgacatttccgccattcgacagataatatcaacggattgtgcaaggcatgttgcgcaatggggctattgaggctccctctgttttccgtgtccggtctgcccgacctaaaagcaggcattaacgggactccgccaatctatatatttgccatcgggcctaatcttaaggaaaccctcgtttcaaattggatgcatgttgatagtataggcaatccctcatgggtcgcgccgtcgattactaataattctagctcttgcgcgcctttgcttgacggattgacgaccttatcaagaaaggtctttctgcacaatcccgatgacgaaatgtcagactgtataggatgtggcaaacgggactttttgataacaacatgtgaattccagagcgccggagaacttcgaaacgaattatgggatgatcctcatgttttgtacacagacaaagaacctcgcaaatcattaaaagctccggatcccacatcgactgggagattcagaatggatagaccgtggccggaaacggcatctcgaatatcccaatcaaacagattcattggcgcaaatacggacaatatgattctcgtgataggtttctccacagacaaagcgaaaaatatagatgtctgggaacgaacgataagaataccgtcaaaacctgcaagcacagatacggcggccacgcttatcgaattatggaaaaaagaaagttggctgatagaaaaacagcggatcggttcgagatctgataaagaaaattcatcaatggccgcaacgatacgtcctcatgttgagcatgtggtttcgtcgcgacttgacgaattgctaaccggcgaccctgccgcatgggacgacgcctcgcgcgagtaccgaccattaatgagcgcggttgccggagctttatccccggggtttacttcttcggctctcgaaagacgcagacaaatatcccgcgtcatccccgatatgcgtgaaaaaaaatccgccggaaaatcccgcgtgaagaaaggaggaaaaaaagatgagtgaaacgcagcgctttatcgacacgctgacgaaccttaaatccggcgagttaagcctgttgcgcgctcactcaggacaaaaacttgacgagtccgtccccgcatttgatttgttcacaggaatatggtggccgttaagacaacggagtcaacgcgcgccgcgccgcgaagtggcgtggctgatagcgaaactctacgcttttcgtcccgccgtttccaacgaacaaggaaagactctcgcgtctcaacttgggagttctatgccgcgcaatcagacttccgacgagtcaaaccgccttaggcaggctttcgacaacctgcttcttgcatcccttagcgacattgagccgagtttacaatgggctttagacagaatcgagtcaaaaaaactcaatctcgattgggttaagctgaccgacgatctttccatctgggaacgcgagtcaacccgcctgagatgggcggaagaatttctaaaccgaaaaggagaataacatgctaatcgaaatccacatgatacagaaccacagtccggccaacttgaacagagacgaccttggcgcgccgaaaacctgctatttcggcggagtcatccgctcgcgcatttccagccaatgcgtcaaacgaagcataaggatgagcgaggagttcaaatctctatgcggcggcgtccgcacaagacagttggcaaaactgatttcagaaagaatccaaggcaaggcagacgccaaaaagagagctgtcgcaatactcaaaaagtgcggcatcgctcctaaagacgaagaaaaaagcgatatgttggtctacaccacaaaagaagcgatctcgaaaatggcagacctgctggaaaacagttccggcaagtccgacgatgagcttgcatcggaattcggggggcttatttctgaattgaccgctgttcccgacatggccttgaatggaagaatgcttgaaaccggtgttcttaaagacacaacagtcgaggccgcgcttcaagtcgctcacgccatatcaacgcacgaagcccgtccggaagttgattattacgttgccgcagacgacattccgggagccgacgcgggcgccgggtatgttgatgaagctttgttctcgtccgcatgcttttacaaatatttctcaattgattttgaggctttagttaaaaacttgaaaggcaacaaagaactcgccgcacacaccgtaggagctttcatccgcgccgcggcgacagtcaatcccacaggaaaacaaaacagcttcgccgcgcataatcctccagacggcattttgattgaactcaaaaaatcgcccgttagttatgccaatgcattcgcaaggccggtctctatcagcggagggcgcgacatcgtttctcagagcgtcgctcaactcggacaatacatcctcgatctggacgccggctacggtaaaccggaaaaccgattctggttctctccgaacctgcggttcccgttgcagacgatagaggagaataaagaaatcgatctctcagataacaacgtcaaatcacttgacgaactgatccccgccatcgtctccgctatcggatatgactggagcaaagtaaaagaggttgttcttaattcagaggtggcatgatgggcgaaaacacgatgtttctccgtctagaagggccattgcaagcgtggggcggacatgagtccaagtttgtcgtccgcagaacctgcgaagcccccacgaagtccggcgtttccgggattatttgcgccgcgcttggcgttccgcgagcagaagcatcctcattctggttgccgaagcttcgctctttgcttatgggcgtcagaattgacagggccggaatccgctggtgggactaccacactgtgggcgcagaaatgcagatgagcattgcggaagccgagggcaagacaaagaaaggcgcgctgctcacgcgtcgagaatatctttgcgacgcttcttttttagtcgctttgcagggagattcagcagtgatcgatcagatcgaaaccgccgtaataaatccgaaatggacgctctatctgggaaggaagaactgcgttccatcgcggccattgagcgagcgccctccggaatcgcatcctgatctgatctcggcgttgtcatctgttccttggcgcagaaggaacaaggaagatgaagcgccgcagtcaatcgactgcctgattgactggacgcccacgcaagaacagccggaagcgccggatgacgcgttagtgtggcacgatgtccccatactgttcgagccgccatcccatcagcctcggtttgtgatgctgaaaaacctctcagttggaacagaaggagatgtcaggatagcggaagacgcggcgcaaagcagagttcccgatccgccacgttcccgcgcggactattcaaactccgcatacaagaacgcgcgggccgagcggctgaactccgaccacggactttgcgttttctgcaaatctcccgcgacaacagttcagcatgtgacatatcgccgcgctggcggcaatgaatctcaagaagatttgcgctctctttgccgactctgtcacgacgcagtcaccatgatagagtacggacacggaatggggcttgaccggataaaccccgaacaccctcaatggcgcgatgaaattatcaagaaacgagaagaagtagtccgataccggtctctcgaaacccgacggagacgcctgagcgcagaggaggtggaataatcgtcatgtttctttcttgccttttaatcaacaccggcgacaaccccgaccgaccgcgtccgggaagaatatggttgcgcaatctttacagagtccatcagcgcttgtgcatggcgttcccttcgtcttccgcatcgttagccgacccggattttcttttgccattcaagcctgacggcttcgcaaaaggccatgtgcatgtccctcgcaaacctgataccggttttctgttccgcgtcgaccctcttgcgggaaacggagccgcaatcatcgttcagtccgcatcaatgcccgattggcaatatgcgttccacaacgccgggtttcttctctccgccgaaccgcaagtaaaagccttcgagcctgtcttttcccttgatatgcaataccggttcaggctccttgcaaacccgactcgaaaaatctgcaccaagaccggcgaagacggcaaaagacgcaacggaaagcgtgtcccggtggcctcagataaacttgaagaatggctacattcgcgagccgaacgcgcgggtttttccgtcgttaaaaactctctgtccttaactccgtcttatgtctatgtgagcgcgcggaacgaaaaccttaaagggcaaaagcttcgttccgtccggtacgacggcgttattacaataacggacgcggatctattcaaagaggcagtgacaaacggcatcggcggcggcaaaggcttcggtttcggccttgtcagcctcgcccggatatgaccgccatgagggacttgcgtgaactgccgaaattcgaaaatagatggagccatcttttcctcgaacacggaaggctggacgaaaaggccggagccttgctatttcacgggaccgacgggtctatcgagattccgattaaccagctaggactgcttttgctaggccccggcacgaccgtcactcaatcggcaatgcgttttcttgccgacaacaacacgcttgtgtgctggacaggcgaacaaggcgtccgtctttacgcgcacagcacgggaggctctcactcctcaagacgcttgcttcgacaagcggggctttacgtcaacatggattcgcgcatcgccgtcattcgccggatgtacaacatgcgctttccggaaaaacttcccgactccgtttctctcgacaccgtaagaggaatggaagggcacagagtcagggaggcataccgcaagctcgcggaagagaacggcgtgatgtggcgcggcagaatatacaatccgcagaactgggatcaggccgacccgctcaaccgggcgctctcatccgctttcgcctgcctttacggcttgtgccacgctgcaatactttcggcgggatattctcctgccatcggattcattcataccggcaagatgctttccttcgtctatgacgtcgccgacctgtacaagatggaaatagcagttccgctcgcgtttcaaacttgctctgaaagcgatgtcgatgtcgagcgcaatgtaagattggcttgtcgggacgtttttcataaaacaaagctgatgaaacgcgtcttgccggatatcgcggaggtattagatgctggtgatgatattggagaaatccccggcgagcttgaggggagacttgtcacgctggatgatagagccgcgaccgggactctaccttggcaatccgagcgcgaggattagagatattctgtggaacaaagccgtcaagaaaatacgcgacggcggcgtcactcagatatggagcgacacccgctctccgcaaggatatctttaccgctcctgtgggaaaccggcccggccaatgatcgatgtcgatggacttgcccttgttctttctccttacaaaactgaaaggactgacgagactttgatcaatcaaaataataaggagtcttcacaagatgattgatttgacaatactactaaaagtgttttaaaaaaaccggcatacaatatgctggtgtcttccccacgcgtgtgggggtgaaccgccgactgagaacgacggcgaccgaggcgcgccgtcttccccacgcgtgtgggggtgaaccgggggcgatatgaaatccactaaacaggccacagtcttccccacgcgtgtgggggtgaaccgtttgtcaactggaaccagatgtacagctataagtcttccccacgcgtgtgggggtgaaccgtcttcatgctttgatcctttcggtatgtttgtgtcttccccacgcgtgtgggggtgaaccgatactcgaatacccgaatcctgtatctgcgccggtcttccccacgcgtgtgggggtgaaccgtgtttcccatgttgtctataaaattgagagccgtcttccccacgcgtgtgggggtgaaccgggggtgaaatgatgagcgttttttcgcagaaagtcttccccacgcgtgtgggggtgaaccgacgaagctatgcagttgcctaaaatcctgaacgtcttccccacgcgtgtgggggtgaaccggtaaatgccccacgtgcggcgaaccgatgtacgtcttccccacgcgtgtgggggtgaaccgtaaactctaatccgtcgccgctatctgtggcagtcttccccacgcgtgtgggggtgaaccgccatcgttgtcttccaccaggccgcttacgtagtcttccccacgcgtgtgggggtgaaccgcgggtggcgacgcttacggcttcttctttagcgtcttccccacgcgtgtgggggtgaaccgcagcctttgacagatggaatgcccgccgttgggtcttccccacgcgtgtgggggtgaaccgagaagcccatgacacaaacccaactattgatagtcttccccacgcgtgtgggggtgaaccgatggaagaaacaacatctcaaaaacttgcaaagtcttccccacgcgtgtgggggtgaaccgcgggggtcggctgacggggtcggggatggcagtcttccccacgcgtgtgggggtgaaccgcggcgagcagtttgagttgcgaccgccgacgcgtcttccccacgcgtgtgggggtgaaccggagggcgattgaaatggcagaaagcaccgcaggtcttccccacgcgtgtgggggtgaaccgcccggaagctaacaaaggaaatcaacaaacaagtcttccccacgcgtgtgggggtgaaccgccgttgaagataaattgttcccatatgtctgcgtcttccccacgcgtgtgggggtgaaccgtggatcagcacttgattgaccgtgagcggatcgtcttccccacgcgtgtgggggtgaaccgaatcctagagatcatgccgtcgccgccaatatgtcttccccacgcgtgtgggggtgaaccggcttgagcgtggtcgagggcgcgattgccgctgtcttccccacgcgtgtgggggtgaaccggctaatagaattaatagaattaacgtccggaatttcggcgtccggaacaaaattgccgttattctgttttattattgattgtgaaacaaatccatcacggcgaggtttgagatattgtgaacgattccaaagacctgtttgaaaaagttaaacatctattgctcggccagtactttgctgttctttcatcggtacagagggacggcagtccgtattcaaacataatcggttttgcggctacggacgatctcaaacatcttgtttttgcgacgccccgaaacacgaggaaattcgacaatctgctcggagagccgcgcgtttcgcttctggttgacaacaggagcaacagcaaaggcgacgttcatgacgccgcagccgtaaccattctcggagcggtcagggaaatcgaccgcgtcaatgatagcatttactttgagctatacgcggaaaggcatcctcatttagtggatttcttaagggcggacgataccgccgtcatagcggtgagcgttaatgagtactgctatgttagcaagttccagagcgttatgacgttgagcatgaaataaggagacaggccgcaatgaaaatatggaagtttatgaaaagaatcgggacgaccgcggcgacgctggcggcgcttgactccgtctggctgggcgtcattatgagcgactattataaagaacatctcggagaactggccagaagaaacgacgccgggctgacccccgactggaccgccgtgatattggtttacgttgcgctgacggcaggcctgaacatattcgcggtggatacggagtccggcagcgggcgcataaagaattctctcgtcaggggcgcgttattcggattaatcagttatggcatttacgaccttacgaacatggccacgctcaaggggtggtcttgggaaatgacggtggcggacatgctttgggggacattcctgtgttccgtggcaagcgccgcgacggccgccgccgccgcaaagtgagcgtcaaatgaaactgaaccaaatcgttatcatcggagtcgttctcctgttgtcgttcgccggggggcagttcacgtcgtccggcatggactggtaccggactatacaactgccgacatggacaccgccgggttccgtcataggcatagtgtggacgacgatatacatactgacggcggtatcggcgattatagcttggagagttttcgctggggattcccgattctatcttgtggccggactgttcatgatgaacgcggcgttcaacctcgcatggagctacattttttttgcccggcgcatgataggcccggcggttatagattcgatggcgattgaaatcacgctgcttgcgctcattccggttctgtggaagaaatcgcgcgcggcgtcggttctactcctgccatacgcgctgtgggtcgggttcgcgacatatctcaattactgcatctacgcgttgaacaagacgtgaaacaggagacgcccgcaagatgaaaacgatgtttgcgcggataacttgtctgagcctgattatcgccgcttcctccgttatttcggttgcgctcgcttcggattcaggatatgtcgcaacgggcgcaaaggcgaagaatttcaaactgaacgaccagcacatgcagttggtggaactggacaagctgcgcggatcgacggttgtcataatctacaccggcagaaacggattcgacgacgcggctgaaatcatcaagaaactcgacaagaaacatagcgggcgggaagacgggaaaaaagccggcaaggatatccgcatagtcggcgcggcgaacttaaagggcgttcccgctttcgtgaagaagatggtgaaaaaccgcatgaaagagccgcgttatccttcgttcctcatggactggaaaggcgagatagcggcaacctacggttatgatgaaaaagggattgccgcgttcgtagtggatggaaaaggcatagtgcggttttcaggcaatatcaaaaacgccgacgatgacatctctaaagtatccgcagctatcgactcgatatagaatccacccctgagttcatagtagaaacaacggcggagcggcgaaaagcaggcacaggcatcgctgaggcgcgcgctgccagtcccctttttcgctcagagttcacagtagaaacatcgaatgtttattgaacacaaacagacattacgcaaacgataatcaatccccccgccggcattcctctttttgtgccttcattctttatcttttgtttcttaattcattctttcttgccgtcattccttttctcttgtgccgtcattcccgcgaaagcgggaatccattttcacccgcccggatgctatttcgcctatcagcgacattgtaaactgtcaaaagcctcggccttaccatagatgctcccgtttttaaaattgctaatttcaaacctgaccacttcttcttcgcttcttctcgcatttgctatttgtgttgagtcaggcagtcaacagctttgggattgtttgttctgcgcaatactttgattatgtattcctgtatttcttggttgtctgcttcgtcaagaagtttgcacaagagcataattgcagcgtcttttccatattcgccaaggtttcgtatacaagagttctgaaaatcgctgtggtctctgtgaatagattcattgctgggggggttcggcatttttcctctggacaaatctattctttctctgtcacgagtaatatcgttaaagtaactctgtttttcttctccactcgcgatcctttccatcacaaacaatgctttgtcctcataaccccatcttagaagacacccggcagctacgcctctaactctaatgtcattgtcatttatggcgtttgatatcacagcttgagatttgacatccaacctacataattcattggtagcattcattcgcaattctggacttatgtcagatttaattatgtcttcaagcaaggggacgatacgtgggtctcgagaatttgctatgtctactaaaacaagtcccttcgcaaactcggaagtaagatgatttttgtattgatatatttttagcggtagttcacagcaaaacgttcttctatcgtattcatatatcaaccgctgatgctttttttgctcttcttcatccatatcatcgaagtctttccggggatcaatatatgatggtttccgcgaagaccaaacagggcaccactcgtcagctctgaaagaatcagatggattatccagaaacttatttaaaacttcctctcccatctttatctcttcatccggacacgctttcaaacccgtgaaatcatctgcggatgcgctgacaaaagcaatcaatgtccacaccaagcagcacagtatcatcagcaaaaccgcatatggtggagtcaggcggagcctgtttacagaattagagttgatctggttggctgatcttgattttgtataagcacggctgttgtagggatagttgttcggtcgcggatgtgtggtctgtcgcagcttcatggcggttatgttgccattatgaacgaaggagaacgatttggcaacggggggtgggaggttgtgtgttgtggagggcggatggggtggcttaaggagtgggatgctaggaataaattcccggaaaggcaaagcggcaatgaattgccgcactccaaagttccacattaattttggctgatccttaggcataggcagaaacgagtttggggggcgcgcccggagggacaagagcgaagcaggtgtgggcgctaaagctcaaggatgtcggggcgggacaggcgggcgccttggaaatcaacttcgagttcgggccattcgcctgtgcgggtgatgaattcggcgcggtcggcaaacgcgattatggtgtcttctgatttcgtgcctgtaatggaggggttccatgcgaaagcgcaattgggtttgacctcgccgggggtgtcggggctggcgcagaagtatcttgacttgtagccgcacgggccgccctgatggtgaaggagccattcgtggtcgaagccttcgctggagtaaacggcggtggcgtcgcggaaaacggaggaaatcttcgcgccgggtcgggtgagcaagttgaaagccgcatcgacgcggcagcaggcggcgtgtctgcggcggaggtcgtccccggcggggccgaagctgaccatccgagtggcggaagccacaagcccgccccttctggcgcagaggacaagcattgcggctcgctcaaggggctgccgcgtcggcagaggatgcctgtatgccgggagcctgcctccggaagctacgaggacgacgatcggctgcgcgtcccgcgtccagcactcggaggcgagcgcggcggcggcggcgttctcggtcatgcccggacgcaaagccctcgcggcggactcgagcgcggccccggcgtccgctccgagcgccctgaacctgtccatctcgctttccgtcaactccatcatcaggtcggagaaatcctcgcccgccgggacgaagccggaggccggcatgtccgccgccgccacgcccgcccccgcgcacatccgcgctatcttcgcgttcctgtcgtcggcccatggaatctcgacaagctccacgtccagcccgacgagttcctcgtctctgattcttgcggactcgattcggttggtcacgaccgcgcatcggtctggaagcagaacaaaggaggcgacgcccgcttcggcggccatgttcacgtggcaactggctccgcaagcggcccacgcaaagttgtccgaccgcgatagcgccagcgcgccccagccccgctctttcattctctcccgcatcctgtctatctttatgccgaattcttccgctctggtcattgttccggccctcaggttattgtttgtcgcgacgccgccgcgattcggatattatatcagttcttaatcggttttgccgattgagagcgcccgcaacggagttgtggacgccacccgtgatgacagggttgcggatagcgagcgcgctgatagctaattttatttaatcgctgatataatgattcgaggcggttgcggtggggacgccgcgaaacttgcgcggattcgcgtattgaaccggagaatgcggggcgcgaacgccgaggagcgaagtatgttaataggaattatatccgacactcacgacaaccttgaccggttaagagcggcgatatcgacgctgaaatcccgcggcgccgcgcggcttatccactgcggcgacatcgtttccccgttcgttgtgaaagctatcgcggaagccgggttcgaggagtgtttcggagtgttcggaaacaacgacggagaattgatttatctttccgaaacatttaagaagatagggcggatagagaagccgccggctttcatagagatgggcggagcgcgttttgccgtgcttcacgagcctatgccggacgacgcgatggcggcgctgccggtggacgccgtgctgttcgggcacacgcatcagcctgttctcaaggacggcaaacccgtgatagtgaatcccggagagtgttgcggatggctgacaggcaaatcgactatcgccgtttttgacacggcggggatgaaggcagagctaatcgagctgtaggcgcgaaagccgcgaggaggccgcaagccttcggaggaaacagatgaaagttaaaatggcgataatagcggcggttctggcggcggcggtctgcgctccggcgtcggcggttcttccggacgcgcgcgggccaaacgcctctgtagcaggcgaaaactccgcgacgatgaaagaaattttcaggataaaggtggagaacgcggcgggcggagcggtggaagtgagcgaagacggaggcgcttcgtggacggccgccggaaaagtcctgctggccgccgggacgataaatccgcgagcgtacaccgccagcggctgggcgtcttcgggggctgtcgctgcgaccgccgtaaacgccattcacataaaagtgcggcagaacgaagacagaggcgcggtgttcagcatcctgcccaaagatttcttctctccgccggcggattataaatctttctattcccggaacagttcaataataacgaatatcccggctggagggagcattttcggaggagccgaatcgccgttcataggctcgcgggttctcgcggcccgcgccggttccgctcactccccaatcgccgaggattatacgccgtcagaaggcgattccctgctgataatcgtcgaacagccggagaaatatccatcggaaatcgtcttcgaaaacaggttcggagggttcatccttataaagtatcccggagaggaaccgaaactcatcgggcaggtgttgaaaccggtggcgggggttggaaggttcgaaggctcgctgtacacggacgtcgggagaatcagggcgaaccacacgggagtcatctgcgtctcgacgtcgccggtgggagagataggcggttttcagataatccctgaaaaccacgcgatgagcgcggagatggagaacgcgaggctgctgacgcagtggatggtggtcgggccgccgggggcggcggacccgtcgctcgaaggggtggctccgctgttcaggcatttcatcaggccggtacatttcaaaagcgggccgcagggaaaaacgcttgaacaggctttgggggcgttcatagttcaggcgcggatcggcggcggggagtggacgcggatgccgtcggtgtccgggcgggacgacaaagctctgaaagacgtcacgcacatacgcatgctgttcccggtcgaatggaaacattagccgggctatcgcctatgcggggcggccgggctttgcgggttgcgggcgcggggtatacaccggggcgcaaatgcgtataattgagactaggcaaggaaagcgggacgattaaggatgtcggaattaagacgcgaccccgtgttgggtcgatgggtgataatatcctccgagcgcggcgacaggccgagcgatttcatcgcagcgaaacctcttccgaaaacgggcttctgcccgttctgtccggggaacgaagacaagacgccgcctgagatagacgcggtgcgggactcgtgcacggagccgaacaagcccggctggcgcgtgcgcgtggtgtcgaacaagtatcccgcgctctcaatcgagggcgacctcaacaagcgggcgcgcggcatctacgacatcatgaacggcatcggcgcgcacgaggtcttcatcgagacgcccgaccacgacaaaaccatatccaccctagaaccgcaaaacatggaacagctaatgtggatgtacagggaaaggatgatagacctcgagaacgacgaacggttcaaatacatactgatattccggaacgcgggtcagtccgccggggcgtcgctggctcatcctcactcccagctcatcgccacgcctaccgtccccaagagaataaccgaggagcttaacggcgctcaggaatacttcgacttcaaagaccgctgcgtcttctgcgacatgatagacgaagagagggactaccagagaagggtcatcagcgagaacgaccgatttattagtttcgcgccgttcgcgtcccggttcccgttcgagatgtggcttgtgccgaaacatcacgaccccaatttcgcggacttggaagactccgacatcgcgtctctggcgcagtgttttcagaagtcgctcaaatatctggacaaggcgctggacttcccgccgtacaactacatcatccacaccatccccgtgaacaccagccgacagtacacgtaccactggcacatagagataatcccgcgcctgaccaacatagcgggattcgagtggggcaccgggttctacatcaatccggttccgcccgaacaggcggtggagattctgcgctcggcgaacggagacacgcaatgagcgggggcgaactgagccacatagacgaaaaaggccgagcgtcgatggtggacgtgtcggaaaaggaacgtaccgcgcggcgcgcaaccgtccggggcgaagtgcggctcaggcccgacgtgatagacaaaatactgtccggcggaatctccaagggagacgtgttccaagtcgcccgcgtcgccgccgtgtgcgccgcgaaaaaaacatccgaccttatccccctgtgccatcctctcagcctgacgaaagtttccgtcgagttcagcgccgacagagacgctggaataatcgttatcgacgcggaagccaaagcgatggacagaacgggggtggagatggaagcgctaaccgccgcgaccgtggccgccctcactatctacgacatgtgcaaagccgtccagaaagacatctccatcggccctttccgccttatggaaaaagaaggcggcaagagcggcccttataaaaacgaagcttgaacccgaacttgaagaaaaatatttgccggaagaaatcagattaaaaaactgtcgatggttgaccgcgtccggaggcgttcagaatgaaggcaaaaacaatcgcgttggctatagttgcggcggcgtttatggcgggcagtccccgcgcgctcgcggacggaggctccccctcccccgcttcgctgagggttctcaccgcaaacgtcggcaacgcggacatactgaactgcggcccgaaatatttttacaaactgtgtctcgtggaatgggagaagaaggtcgcggaagggatagccaagctgtcgcccgacatagtgtcgctgcaggaagttctggacgttcagtggtgcgaggcggcggccgtggagaaaaacaagaagaatgtgtgcttccggtttgaggacaggaaagagaggcatcaggttcgcaggctgttgggagatgattatacgatagtgtgcgacgggcgcgccaactacgagtgcataggagtgaaaaaaagcgtcgggacgattgaaggttgcgggcgcggagaactgtgccgcgctccgggctggccgctgacaatcgaaacgccggaaggatgctcgacaaagacggtcgtgttcggggcggacgcggagattaatgggaaacggctgaggatagtcaacgggcatccgtcggcggcggacgccggatgccgcgccgaagagttgagaaggttgttcgagggatacgaagggttcccggcgcttgcggccacggacagtcctgcgattatcatgggcgacatgaatatggacccgtttcaatgggacgccgcaaaagacgacgtggcggtttggctgaagcatgttggggatggcaagaaatattactatctgagcggtcctgcggaaaacgacccgccgttcaggacatgctccgggttcacgctggaccacgtgataacgaacgcggcgcgcggctcttgcgtcacgctggggcagtcgcccgggacggaacggctggacgggcatccgaagggggctccgattcaggaagcgcccgaccatttcgctattctttgcgaaatatccctgcctgacggggattgacggcgcggcggcaatcggtttggagcgggatagacgccgttctagggccgatttaaataaagttgcaaaaatatatctcaataacaataataatgcctgttggcggagtgtcgcggaacgaactgcgacgcgcccgtcaaaattcatcaggggagtgccgcgatggataaggaaaaagaaaaagaattagtaaagtcgtatctttaccttaacgccgtccttcctcagcttgaggagataatcgcgtatgacgcggaggcgcgcgagctgacgaaaggctggaactgcacgatccagatgcacgtgcccggcggggcgggagtcaggttcgtcttcaaagacggcaaatgcgaggcgaaactgggcgctgtgagcatgcccacaatctcgctgaggattccgacgccggaagccgccaacaaaatgatagagaacaccggcacggtcattcccatgatatggggcttctggaacatcgggaaactcggaaagttcatgaagctgacgaaactcatggagaagtatctgagaccgtcggaagaagatctcaaaaacaaggacttcttcgagttccatacgcgcgtgaaactcatgatggccgtctatggcatgaaggccgtcggagagcacgacacgtatgtaaaaggaatagtgtcgaaagtgccgaacgggccgatggagataaaggtgctgccggacgggccggtggcgcatatcgtgctggacaacggaaagttcgctgtggccaaagggccggcggcgaacccgatggtcgtcatggaaattaaagacatcaagctggcgtacgatatgctgaacgccaatgtagagttcatggaagagctgggcctgtgccgcataaggctgcgcgggcacgtcggaatggctgaaagcctcgcggtcgttatggagcgcatcggcctgtatatcagttgacgccggacgactatacccaactggagggcttgaaaatggaaacttacaaatttgataaatcatacgagtggttcgagcgggcatgcaaagtcattccgggcggagtgatagggcacaaacaccccgcgttcaccgtccccggctcgtatccgtatttcgcgactcgcggcgagggaagccactactgggacccggacggaaacgagtacatcgactggatgtgcggtttcgggccgatggtgctgggatacaacaacccggtggtggacgcggcggcgcaggaacaggcaaaactgggcgacggcatgagccatccggggccgatcagcatcgagtacgccgagatgatggttaaactcaccaagggcatggactggtgcgtgtacggaaagaacggcgcggacatcaccacatggtgcatgaggctggcgcgcgaatacacggggagaaagaaaatcctgatcgcgcgcggcgcgtatcacggcgctcaggcatggtccaccccaagctacggcggcatcatcgacgaggatcgcacgcacgttcacttcttcgaatggaacaacctagactccttcatggaactgatcaacacatacaaagggcaggtcgcgggcgtgatgatgacgccgtaccaccactgcatatacgcggaccagcagatgcccgctcccggctggtgggaagccatcggcaaagtctgcaaacaggaagaattgattctgatatcggacgacgtgcgcgccgggttcaggctcgacatggctggcagccacgcctacttcggatacgagccggatctggtctgctactccaaagccatagccaacacctacccgatcctccgccggtctgggaacgaacaaactgaaagagaccgccgaacacgttctgttcacgggaacgttcttcagcagcatggttccgatggcggcgtccatcgccaccgtgaaagagatgcagaggctggacggagtaaactacatgatgaaaatcggcaaggcgctctgcgacggccttgtcagcgtaggcaaatcccacgggtttgagattatcatgtccggaccgtacgacataccgttcatgcggttcgcgcgcgagaagaacttcatgctcaaacagctcttcagcggcgaggccgccatccggggcgtcatcttccacccgcaccacaactggttcacctcctgcgcgcacacggaagaagacatcaagaaatcgctcgaagtggccgacatcgctttcaagaaagtcaaagacaaatacggaagcgactgaagcgcgacaaacggatagacgcagtaaatccgcctttaaaagcgcctccggcggccaaagagaaacttttgaaaaagtttctctttggaatctcttcaaaacttttcacatgagcgcggcggagcgatggcgcgaacgcgcccgctccgccgcgcgcatagaaatgttttgagggaaaacttttttaaaagttttcccttaaccgcattaaagcgcctccggcggttcaaggaaactttgaaaagtttccttgaaaatccttcaaacttttccttgcgcgtcggtacgggacgctgacgcgtcccgtaccgacgctcctgtggaaatgtttaagaagaagattcctcatgaaacccctttctcaatatcttttcgcatgatacgcgccgatgggaagagcgaagccttcccatcggcgctagcgcgaaaagttttgaaagggtttaagggaatactttttcaacgttccgtcattagtaatacgtatcatatacgaagaactaaatgaaagctcccatttactatttggtaaaaagcatcatgcgcaaaagaaatagttttgcgcatggcacaactcttagcgagtatattctgctataatattagaagtaaaacacgaaaagcttaactctgtttttcacattagaacaactgcgacaggagcgcggctgaaactttgtaagctcgccataatacgcttgttcatgtgttaacaacgattcgcgcgcgcaacgtttaatgatttggagcaaggcaatgaaagaatcaggaatactgcttgggttttatgtggaccgaaaagaagctaatgtggcgtttaggatgttgcgacgccgtcattttcgcagaaccgcgataatttcaaaaaccgcctccggcgtggttcgcaaaaacgccgcggaggatagatattggacatgcgtaggagcggtcgcaggcgtcgcgattggaataataattgcgcatctgtcttttggaacattcgaggcgatagtggcatggcgatgcgtagtcggactattgcttgcggctgccggcggggcgattgtcgcaaggctggcggtttatgtctttcagtcgagcgaggatcgcgattttacgaagaagcgatcccgatggcttgtgaatgaagaaacggccgtcatcgtgaaagctccgttggagtcgctggatcaagctttggcgcaaatgcgcgtcgccggagagacgcaaccctcgatttttgtttttcaccatgaccgggtcacagaggcggaatctggatctgacaagaatgaacacatgacagcctcgcagttggctgtgcacgcgagactgctagccggatatcatcgcgttcagtcatatatgggcgtcaagccccatcttcttgagcttgtggatgtttgtgttaaggagatagacctttgccgccgtgaactcgccggggcgtcgcgtctcgaacagcgcgtttccccttcagcggaatggattcttgacaactatcatctaatcaaagccaattacgacgatgtgcgacgcaacctgcccggaaatttttatcgagaactgcctatgctggccgctgagcaggttcagaacatgccgaggatttactgcatagcgtcggaccttgtatcgcatactgacggccaactggatcgtcacaccatattgaaccatcttaacgaatatcaagcggtcagtcctttgaagatgggcgagttgtgggcgatgccgcttatgcttcgcatcgcgcttatctcattcataagaaacctaaccaatcagatgacagtgtggctgagagagcgcgagaacgccgacttctgggccaatcgacttctggtcgccgcgcggctcgcccccgacagtcttttttttcttctgtccgaactggagcgagaacagcctgagcctagcgaccacttcgcgtttcacctcaccggacatctcttcggggagagcgaggttctcgcgcacgttaagagttggtttgagcgcaagagcggcggcgtcttggccgacagcgcgattcgcgagcaggcgcgacaggccgcgcataacgcttccatcggcagcgcgatagccagtttgcgccaactgtctcttattgattggcgggatgttttcgaagacttgtgcgtggttgagaaaaaactttgcgaggacccgtctggggtgtactgcagcatggattttgccacaaaggacagatatcgccatgcggtcgaggaactggctcgcggcggcggcgtttccgagcaagaggcggcggaggcggcggttctgatggccgacgcggaagacaagccgcttgatccccgaaaaaaccatgtcggatactatctgatcgacgagggccgtccgcgtctggcctcccaactggcaagccgggaaaccctgcggcggcgaattcttcattgggtctatcgcaaccacacggtcatatatatttcatccattctgcttccgacggtcgcggcggtcgccgccgttgcggcggtcagctctttcgcgggagggagcgcggcgctaaccgcgcttgcgtcggctctctcatctctgcctgccagccagatagccgttcaggcgatcaactaccttgtgacgcgttttttgccgcctcgccttctgccgaagatgtcgttcgaaaaggagggcatccccgacgaattccgcacgcttgtcgttgtgcctatgatgctctcaaacatcggcacggcgcgcagggagatcgaaaagctagagatacgctatctagccaatccggaaccaaatctcctgttcagcctgttcagcgacttcaccggctccgacaccgagcgcgacagcggagacgccgaactccttgcggccgccgtcgatggaatcaacgcgttgaacgaacgccacggcgcggggcgttttcttttgtttcaccgcgaacgcgtgtggacggagtcggagcagtcctttatcggatgggaacgcaagcggggaaagcttgagattctaaacaggttgctgaacggcgaagcgcttcccgacggacagcagatcgtccgcgcgggcgaccctgacttgctgaagaacgcgcgcttcgtcatcacgctcgacagcgacactcaactgctaagagacacggcgcgacgaatggtggagacaatcgcccacccgttgaaccgcccgccgttcaaccccgcggacgccgtcggctccagcccgtacactatcattcagcctcgcgtcagctcaagtcttcccagcgcgacggcgaccgccttcagccgcttgttcacagaccccatcggaaccgacccgtacacgaaagcggtttctgacgtttaccaagacctctccggcgaagggtcgtatatcggcaagggcatctacgatccgcgagcgtttcaccatgtcttgaagaaccgttttccgttgcagaggattctcagccacgacctgatagaaggggcgcatcttcgcgtcggctttgtcagcgatatagaactgctcgacgaatttcccggcgactatttttcctatgtcaaaagagagcatcgctggactagaggcgattggcagattgcggactggtgcatgccgaaagcgccctcccctgacggcaaacgcgttgcaaatccgctcagcgctctgaatcgatggaagatttttgacaaccttcgccgaagcgttgcgccggcggcgtccgtgttgtttctcgcttcgtcatggctgatatcttcgggaatgggcgctgcggcaagcttaatagttgggttatcggccttcttcccggtgttttcggagcttgtcacgcgagcgaccggcaagcgcggggcggaccccctgtcatggcgacaactagcgcacaacgcgaaacgttgctgcgcggaactgcttttcctgccgcacagggcagctatgtccatagacgcgataattcgcgtgttctaccgtcgtttcgtaagccatcgcggactgcttgaatgggcgaccgcgcaggcggttcaacagaaagcgtccgaacggcttcgcccgcttctggctcaactgtgcgccgtcagcctgttctctgttgtcttaggaatcgcgatatttctgtcgcgcccggataatctctcgatctctttgccttttcttttgctgtgggcggcttgtcctatagcagggatgcgtctgagcgcgccgcgccgcatcgcgcgcgcgcgccctatcgcccgcgaagatgaaatcatgctcagagtcacagctcggcgctcgtggcgctatttcgaagacttcgtaggcccggaaacatcttggttgcctcctgacaactttcaggtttacgccggaaacaatcttgccatgcgcacaagccccaccaacatcgggttgggcctgctcggcaatctgggcgctctcgatttcggctacctgacctgcgacgaggcgttcgagcggacggcgaagtgcatgaaaaccatagcccgactcgaaaaatacaacggacaccttctcaactggcacgacatcaagacgctcgaccctctcgaacccagatatgtgtcgactgttgacagcggaaatctgcttggcagcctgtggacgctcagcgcgggctttcaggaaatcatcgacgaacccgtcatcgggccgcaggcgttccacggccttctcgacacgctccgcgcgctgcgcgaggcgcttgagaaaagcgacagagcgagagttcataacgaggcgttgaaatttctcgaacaacaactggccgagcctccgaaacgactgtgcgaactcgcgactcggcttttatccttgacaggcgctgtcgcagagttgcgccgggccgtgtgcgaaaacgccgcgccacgcgatgaggccgcgcactgggcgaaccggactgaaacaatgcttgcgtcatggcgcacgctgatagaccgctatctcccgtggatggaagcgattgcggaagagacgaaaaccgccggcgacgagacaagaaacggcgcgattgcggactgtcttgaggctctggaaaaagcgccctccatgcgacagctctccgagggaaattttttactgtcgaagacggcggcaaatgatgaaaacaatttgaacgaaccgcgacgattggaatgcggacagcgagtcgaagacgcttttgcccgcgccaaatggatggccgccgaaatgctcgaccgggtcggcagcctgttgaactccgtcaacgagttgtcagaaagcatgaacatgcgcttcctgtacgataacgagcgacggctcttctctataggatttaatgtgagcgagcaacggcttgactcgtcgcgctacgatttattggcgagcgaggcgcggataggaagccttgtggcgatcgcgcgcggagatgtgccgggcaagcactggctggcaatggcccgtccgtacggctccgcgggggggccgccagttttgctaagttggacaggcacgatgtttgaatacctgatgcctcttctcttccagaagtcttttgaaaattcgctcttggaccacgcatgtcgggaagcggtgcgcctgcaaatcgcttatgcccgccggagaggcgctccgtggggcgtttcggaatcggcgcacagcgccgtggacgcgaatagaacatatcagtatcaggcgttcggcattccggcgctgggactgaagcgcaacttgggagaaaattttgtagtggccccttacgcatccatgctcgcgctggccgtctcgcctcttgaagccatccgcaacctcaagcgtcttgcgcgcatgggaatgtcaggcgactacgggttctatgagtctattgatttcacccgcgaacgaagccgcgaaggcgagcgcggcgtaattgtcgaagtttatatggcgcaccatcaagcgatgagttttctggctatcgacaacctcgtcaacaacagcgcgattcgacggaggtttcaccgcgacccgagagtgcgggcgagcgagccgcttttctatgagcgctctccggcggctccgcctatctaccaaggctcagaccgggagcagacttctttccatgccgcgccggacgaaatcgctccgtcaacaagcgttttcaacacgcctcattccccacaccctaaaacgcagatgctttcgaatggcaactactctctaatggtcacaagcgccggaggcggctatagccgatggcgagacttcgacatcactcgctggcgggccgacacaactagcgacaattggggtttcttctgctatatccgcgaccttaagagcaagcgggtttggagttcagctttccatccggcgggcggcgacattgagaactattcagttagcttcaagcttgatcaggcggagattcgccgctcggacgatggaattgaaacggaaactctcataatcgcggcgcctgaagacgacgtggaaattcgccgcataacactcattaacaggtcaggccgcaagagagagcttgaggcgaccacctacattgagcttgccctcgctccgcacgactctgacaggcagcacccggcgttcagcaagcttttcgcgcagactgaaacggagcctcggttcggcgctctcatagccacgcgccgcgtaaaaaatcccgacgagccgaggatatgggccgcgcatttgatttgtatgccggagcaggacgagcccgccgacgagctggagttcgaaatggatcgcaatcgcttcataggtcgcggtcgctccttgtcggaccctgcggctctcggcaataaattgtccagcgtcgcggactcgtccatggacccgattttcagcttgcggcgaaagataacgctcgaaccgggagcgcgccgcgatttctccctcattctctgcgccgctgaaactcgcgaacaggtcgttttgctcgctgaaaaatacttcgaccccaattcggcgtcccgcgaactagacatctcatggagccattcccagcttgagcttcgccacctgcgcattaacccagacgacgcgcgtcgattccagaaactcgccggctcgatgatatatcccaactcccggctccgtccatggagcgacctgctgaaacagaacaaacttgggcagtctcgcctatggccttatggaatatccggcgaccttccaatcgccgttgtagttattaaacaggacgcggacatcgacttggcgcgccaagcgctgcaggcccacagctattggcggctgcgcggcctcaaggcggacctccttatcataaacgaggaatccgcgggatatgaacagcctctgaacgaacaactgaagcggcttgtcttcagccattcgatgaacacgggcgtggacgtgcggggcggcgttttcctaaggacagcaagtcagattcccccggaagacatcaaccttatgttggcggcgtctcatgtgtcgctcgtcgccgcgcgcgggcctctggcccaacaactcagcattcccgccgagaccctcagaacgctccccccgctcgccgttaaagccatcaaggaagagccctccgcgcaactcccgttcatcgaactgccgtacttcaacggactgggcggcttcacttcagacggcagggaatacgccatcttcctcggccccgaacaacagacgcccgccccatgggtgaacgtaatcgccaacccctctttcggaactcttgtcagcgagtccggctcaggcttcacatggcgcggaaacagccagcagaacaggcttaccggatggtctaacgacccggtttgcgaccctccttcggaagtcgtttacattcgagacgaagacacgggcgcagtctggacgccgactcctctgccgattcgcgaacgcgacgcttaccgctcaagacacggcgcgggctacagcgtctttgagcacaacagccacgcgatagaacaggagcttacgatgtttgtgccggtcaacgacgacggcggggaccccgtctgcgcgcgcaggcttaagctccgcaacgactcgtcccgcgcaaggcggctgtccgtgactttctacgtggaatggacgttgggcgagcatcgagagaatatgcaggcgcatgtcgtcgccgagtatgaccgcggctcaaaaatgatattggcgcgcaatcgctaccgcgcggattacagcgaaggagtcgccttcgccgcgacaatccctgcggcgagcgcgcacacaggcgaccgcgcggaattcataggacggaacggaagcctgtccgcgcccgcggcgctcaagcgagccggattgtccggaagagctggcgccggatttgatccttgcgccgcgcttcaggtgaaaattgagcttgcgcccggcgaaagaggcgaaatcatctgtctgctcggcgaagccgacaacgcgaccgaggcggccgctctggttaataaatatcgcgacggcggctccgtcgcgaaagcgcttgagcaaaccgccgcgtggtgggacaaaacgcttggcgccgtcagcgtcaacacgccatctcattcggtaaacctgttgctcaaccgctggctcctctatcaaaccataagctgccggctgtggggcagatcgggtttctatcagtcgggaggagccttcggattcagagatcagcttcaggatgtcatgtccctgctgtacgccgctcccaagcttgctagggaacatctgcttcgcgccgcaggccggcagttcagagagggagacgttcaacactggtggcacccgcagagcggggcgggcgtcaggacgcgatgctccgacgacctgctgtggctgccgcacgcgacggcgcagtatgtgcgcatcacaggggacgcggaaatactcaaagaaaacatcagattcattgatggccggacgcttgacgaggaagaatacgaagcctttgggaatccggttgagtcgatcgagagcgccacgctgtatgaacattgccgtttggcgattgagcgcggctcgacatccggcccgcgagggcttcctctcatcgggactggagattggaacgacggcatgaatcgcgtcggaataaatggcaaaggcgaaagcgtgtggctcgcatggttccttgtggacgcgctcaaacagttcgccgcgctcacggagatggttaaagacgcgccggttgcggcggagcgataccttgagagagcgaagcgtcttgcgaaggccgtcgagaaacatgcctgggacggcgactggtataagcgcgcgtggttcgacgacggctctcccatcggctcatcgaagaatgaggaagcgatgattgattcgctgccgcagtcgtgggccgcgctgagcggcgcggctgaccctgcgcgcgccctgcgcgcgctcgaatccgccgcagagcgcctcgcgctcaaagacgagaatatggttctgctgtttacccctcctttcgacgccgggccgaaggaccccggatatatcaaggcgtatccgccgggagtcagggaaaacggcgggcaatacactcacgcggcggtgtggctcgccatggcgtttgccagaatcggcgacggaaaccgcgccgcctctatcctcaaaatgttgaacccgatagaacacgctcgcgaaccggaagcggtcgcccgttatgctgtcgaaccttatgttgtcgcggctgatgtctaccgacttcccggtagaacaggacgaggcggttggacgtggtacactggcgccgccggctggatgtaccgggcatggatagaggatgtgctgggaataaaaatcgccgccggcaaactgctctttgatccggttcttccatcagaatgggacagagcaagcgtcataatccggcatgaagaagccgtttatgaaattgaaatcgagaaccccgacggagttaaccgaggcgtcgcatgggtggagatggacggccaacgtctgaagaacacagagattcatctcgatggagaattggtcaaacaccgggtgcgcgttcggatgggggtttcaactcagtgaaaccagcgcgctttgaacatggctttgaagtgattgctaaaagaatcaaatgacgaatttgggagcgatgcgctgagcggatagttcgcgaggcgcgagcctcatttttgaaatagggacgcggtttcctcgccctgtaaaggcgatatttcggcgcccctgcttcaattattcagagagaccgaggcagagcgccgctgtgataattgcccgcgtttcgccttctctatctgcgaatccgagttcatttggccagcgtctcggagattgttttcaacaaaacttcgccgatgaatggtttctgaacaaacgcgcgcgctccgtcgttcattaatcgcatggctttccctgcgacgctgaatcctgaacacaggatgactttgacgtcattccgtatttgccgcaaagccgcaaacgtttcggctccgtccattctcggcatcatcatgtcgagaatcaccagtctgacatcggcttgattcttcttgaacaaatcgagagcctctttgcctccgttggcggcgattgaactgtatccttgctcaataagaaaatccgacatcatatctgtgaagtctttttcatcgtccacgataagtattgtttcttttttgcccttccgcaatgtttcgtccgcttccggcttgtaggccgttggcgcttccttcgcgcatggcagatacaccttcactttcgttccttcgcccggtttgctttccacctctatcagtccgttgtgcgtctcaactatgctcttggtcaccgacagccccagccccgtgcccgcgcccttgtcttttgtggtgaaaaacggctcgaatatttgttcgagcatatccgccggaatcccgccgccttcgtctcgtatgtcgataagacaatattctccgggtttaatccctctgcgagaactgcaaaattcattgtccagataaacaggagccgccccaatctctagtttgccaccctccttcatcgcgtcgcacgcgtttgcgcaaatgttgagaaaagcctgtccgagttgatttgcgtccccgcgaatcaggatatcgcattccggcgtcgttatttcgatattgttgaggacgctgacacgcaatatgtccactgtgtcaatcaggatatcgcgagccgaagcgtcgcttatttccagtttttcctttcttgcgaacgtaaggagtcggcttgttatgtttttcgcccgcattgcggacttaattatgcgtcgcatgcgagcttggttcgggtcttccggcgacatcgagcctaaaacgacttccgatgttccgataataacagcgaggatgttgttaaagtcatgagatatgccccctgcaagccggcctaccgcgtccatcttttgagactgtatcagttgttcttgcgcgcgcaaaagctcttcggtccgttcctctatgacttcttcgaggcattcccggtattgtttaagctcatgctccacgcgcttgcgctcagagatgtcgcggatgttgcactggatcgcataggcttcgctctcaagatatacgttgctgacgaactcaacgtctactgtttcgtatgtgaccgagttcgagtcgatgattcaacgccgtagatcgccctttattcgttttttcggatttttttaatgaaaaatccgggatagatggaagtcgcaagcctagttcaaagcgttctcagaataacgctcttcacgcatttgttccgacaggcgctcttttgctctgtgaattcttgatttgactgtgccggtcggaatcttcatggctgatgatatttctgaatatgtgtatccgttgaaatgaaacattgaaaacaccagcctgtacatctcaggcaacgaataataacgcctcattatctcttcatttatatggttgtgaaaaaacaccgtgtcaggcgagtccatgtgcgatattcgtcgcgcaactttcaatgccaatttgcttttgtcgtgttttctatcgtcaaaagagatttcttgctctttccttctttttactttgttgatatgcgtgttaatcatgattctgctggtccatgcccggaaattcgtgtcaggcgcaaaaccgccgtaaccttcgcaagctttgagaagcgtttcctgcagcaggtcttccgcgtcttccgcattgcttgctatctgcaaggcgcgagaccacagatatgtcttttctttatcaataagtttttccacgtcttcgcggaatgcttccgtcatagtcgctctcctgttcatgccggaaacgctttttaggcgcgggcctcgacatcgttttcatgcgcaaagactcagaatgtattctgcccgtcgcgttgcgcgccattgctcaacattaggctgagatcgcttttattttgcggcggcgacattgcgctgagccagttgcagataaaagaaagcgtgttcgttgtcgggacgtattcgaagagcttcgcgccattcaggaatcgagtccgcgaagcgcccctgttcgaacagtatgcgagccgtccatagatgcgcggccgcaaaatcctcgcttgcggtcatcgcctctctgaacatgtcaagagctccggatatgtcgccaccctgatatcgggcaatgccgctccggtgcgccacatacgcgttgcctccgttctctctatagttcgcggcgtctttccgcatcatcagaagaacttcgtcttccggagcctctttgatccctttatccagaatagccagcgcctcgtcgtacatgccttcattctggtaaatagtggcgagccagacgtacgcgtccgccagtttcggatcaagcaataatgatttctcgagttcttcaaccgccatccagtaatacccgcctgttatatatgtgtttgctccaagccagcggcggcaatctgcggcgcgcttttttacatcttctatcctccagccttcggggtacatcgttatgtaataatcccaccactgagccgctttgccccaccatttcgcgccctcgtacgcccgggccgcttttgttataacgttcccgtctctcggattgctttgcaaatgcgtttcatagtgcgcgatggcggcgcggtaattttcgctcgccatcgccctgtctcctttttccaccgatgcctcagcaaccgcgcttgccagcaatgaaaacgcaagaatcgtcgcggcaacgatgttgcgtcccgccgcgcctcggcttgaaccctttgcgcaacacaagcatctcagaatgttcattgcttctatcttcttgtaatgtttcattatattcctccgcgcttttctgtaataacagcgctatttgcacaaatgcgctttttaacaagtcgtctcttgttcgagcaaaacgcattagctcagcctctttctaattccttgcgtctagcgatgtcggttaagcttcagtctcttgctttttcgtgtgaatcaggtccgccaccgcatcgccggattcatccatcgcctttttcatgctcttggtaatatcgcgcgccgtgtcggcgacatcctcttttcgagcagcgatcttgtctatggctttttcaacgttgtccgacattttatccatagccttgtcaacgcgctcgcctagcgttcccttgtcgctcttgcttttatcgacaacgttgtcgatgtgttcgccgatcgttttcttttcattcatgttttgtttctcctttgtatttgtttgctgcgtcaatgatacgtcgctcgcttaacaatcgctatcggctaaaaagcatatgtttgtaaccatcgcggtttatatatttagccacatcgactaacggatgaacacgaagctgacttgatgacggattgcgccggacactaatgctcgctctgccgtcaagaggcgacaaccgccgccgcaaggctgtctcaggcaacaagattgaacaggaaaacattatttattttagtttgaagcgcaggcttcgcggagacgaggcgtttcgggcgcgttcgcgttcagataatccgttagagacaacaatttaagcattcgcatcacattcgcctgcaagcattgcaattcgaatgagccgctccatctgtcagtaagcgttcttaattgcgccaaaagccccgcgccggcgcagtcaagaaaagtcactcccgccatgtcaaacgaaagggacactccctgacgcatatactcgaacacaaggtctttaagtctttggcatacatcgtaagccagttcaccctcggctaatatcaatgtggtttcattctcattaactatatcgcaactaaacattgtttcgcatgtcctttcaaaacacagtagcctccagttaaacgattcttcgccccttaatgactctcaccaatacaactacgactgcgatgacaagcagaatgtgaatgaagcttcccatcgtatatccgctaactatccccagcaaccacaaaattgcgagtattaatgcaatcgactccagcatgagcaatcccccggtatcaatcgtttctgacgccgcgcgcgccgcgcttagtcaaagcgtcatccggttgaaaacatcattctgtgacagattatgatcgtaacaataaggcgttataacgccttgcaaacagtcataaacaacgtcgaattcgcatggcttttctatatacctgtttgcgcccgctaaaaatgccctcaacctctcatgcatccctgtctttgccgtatgaatgattatcggcatgtatttcgattggtcgttcatttttatcttgcgacagacttcgattccgttcatgtcaggcagcataatatcgagcaaaaccacgttaggttttttttcggtcgcgaaggttacggctgtttcgccgcttcccacatcgaaaaccgcgaaatcatctttcgctaaaaataactctcgcagtttctgtcgataaagcttatcggcgtccgctatcaatattattcttgatgccacggcaaagcctccttttcgcgcttgttttgtttgcgctcaacattaaagggacactgtccgcgcgctttaatgaattaaacagttgagaccttgccgcaatccaagaagttcaaagcgaggccgagcgtcgctttccatgtttcagcgtgagtaacgccgccggcctgctcgtgacatgcccttggagatgacattagattatgcgcgcgtgagccgcttaatcagagcgcgcgcatagccgcgcggaacaacgcgccgtcatttcttcgatttaactaggtctgaaatagcgtcgccggtgtcttccacggctcttttaacgcttttggaaatttctcttccaactttagagacgtctttttttgccgattcaagtttatctttcgtcttgtcgactttgtctgaagccttatccaccgccttgtcaacgcgttccccgattgtctttttgtcgctcataatcttttctccttttgtttttgaatattattctcaggctcaagttaattgcgcctgattgcattcatctatgtcgcagactgaatgagagccgcacattcgtctgttatcctcaatccatcgagggtctggcgaacaacttccaagagcggttctatgtccgacgatttggtcacccatgctttcgcaagatacgccctgaaatctttgcgaaacagcggatatgcggtgttcactatcaccgtcctgccgcctgcgcacaaatcggagagcgcctcaagcccgctcatctccggcatcccgatgtctagaaccactatgtccggctgccattcgcgcgctcgctctatcgccgacgctccgttatccaccacctccactgcgtatccctctgtttcgaattcctcgcggtagagttcggccacgcttgtgttgtcttccgctatcaacaaccttgtcataggcttccccctcagccgcgcaatttcaacttgcgccgcttgtcatcctttgtcattcatgtacttcttggtttttcgttctttcttattgaaatactgtttgaacttgttgatttgtttctttactcccgtcaattcctttggtttctgttctgactgctttttcttggcggccgccgctgaggcgtccttcttctttttatcagaagcggatttggctttagctttgttggcgtctctctgcttctcgatgtccgcccctatcgctttgaagcctttattctgcttgcgcatttccattattttctctgccgggtagttataatgtcctgacataaaccttaaatttactagatttacgatgtcgtcatcggcgagttttatcttgttccaatctttttgcggcttgtttttataatacccgtaggcctttccataaggaggccctgccgccgcgccctctctgagcggcacatgatacgattccgccccgaacccgtatcggtttgatatttgttgccacgtttggccttttagccgatagtctgagacgatcttaggagccacattggctttccgcgaaataaaaaacacaaccggaatatcttcttccgcgatgtttcgttgcctgacattcgcaacttccgtcttcggaacggcaaaatactcgcttatcgaattcataaaactgtcggaggcggcgtccgcggctctgttgaccgcgctccccgctaacgattcgcacatggtctcttttgtcgcgacagtcatcgcgaacaaaaccaatatcagcgccaaaattaatatccttctcatctttacacccctcgttttagaaatattccgttgcatacatcatattgctctcaagcgggttgcgctatcggcaaaaaagcaatctttattagctcatgcggcatatatttgtaactgttttagctaaactcagatgaagctgcgccgcgcaataaatagcgtttgtggctgcgccggaacttatatgctcgccacatttagcgcttcattaagagacagcttatcaaagggagccttaacgcgtttggacatgtttcttatttcaaaggagccattccaagactcagccaacttcttcatgcttaacaaaagcccaacgccggcgctgtcgaggaatgacacttttctcatgttgaacaacaagcgcatgcccggactcatacagcttgtgacaatctctccgaattcatcgcacacatcgtatcccagttctccttcagggcaaaccatgatgtattcatattcattgaatattcgatacgtaaacattgtctcccccttttcttcgcccgcgcgatgcttttctctgactaatgcgcacattcgcttttttcttagaacctatcagagttgaccgcatgttatgagtcgagtcattattgaaggcttttgcgttgcgcggcgcatataaaactccgcgcttttcttatttcggcaatattggcgcattgtttaagctgttggatatctttctttttgcgaaatgcttctttattaatggagcttgcgagccttttgcgtccttgctcataatttgtcgaatttcattgtcaggcatagcaggcaatctatttccagagtctgccttaatttcgaaatacggttgcgcatgttgtcggaatatagatactttcacatcggcgtctgatttgccagcttctaggttatgtgtgttatcgttattcttgctggttttctcgccgctttttgacactttatcaatttcttgttcgacaagctttatgttatctactttttctgtcatgacaatcgtctcctttgagatgcttcgtttatatgctatttgccgataaaaacacgatattcgcgactttgacgtctttattaatcataaacagcaatactttaggcgctatcggcgcgagagcatttactattaactattaagtcttttatttatagctttttcgtctattgcgacatgaataaacatgcaaaacaactttcgcgtcaattcttacgacacaaacgcaatccttcttgttgcggagattgcagatcgcagttgtaagacgacaaataaaaaagccctctataaaagagggttatttgcacatggtcccaaggaggacctattcgccgttttaatttgagcgcctcgtgccgataaagcggatatatgactacagattctttctataactgatgcccacgcttatatcttccacgctcagaatgccgaaatgcaatttggcggattcggacagatcgtatctcatgccgaaattgaagtggtctccgtcatactcttccatgaaagtggtttttttcagggccttcatgaacggcgatttctttgatataaggaatcttgcttcgagtccgtagaacagggagtcgtcgatgtcggaggttctgtatcctacttgatatctcagcgcaattttgtcgatccgatgttttgaacggagctttttaccggaagtaaagttcttgctgaccaccgcgtatttagttctgtttgtggaggcgaggtctaacaatcccgcgcttacagcaggatgctcttgcgcttcaggaacaaaattccatttaaggttcaaagagccttcctgttgaactttttcaacgaatgtcacgcctgcttcaaagcgacgaggtagcccgacgttggctttcacataatccttccatccaaccacgtcaacgctgacgtcgtaatcccacggggcgagcacatacgcgctgggattctttacaagccctgtcggccctgcgatagacggaccgttcggtatcatctcgccgtcaatatatggatcggccatcgtatattcatgcgtttttgaaccgtcttccgcatagcacaatgcggacgccgccagcgttaatgtcgcacaacagaccgcgagaaacatgtaatcttttatcagtcgcatcaactatcccccatgttcgccaatgtttttcatccttaataaatatatagttggggaaatatacgcgctatcggcaaaaaggcattatttcataaccaatgtggcattattttgtagccttttaggctaacgagcggaatgagcaaaattgcgctcaaacaacactttaatatttgctcacatgaaagatagttcggcgtcgcttttttggtgttgcgcgtcgctgctttcgaaaagtatcttcatctcgccgtcggcgctaatcattatcgggatgccgccgtagcggcgcgcggattgggcggctatggtgcgcgctccgagatagcttccgagatcgggatgctgttttatcatagcgcctacggctatcaactcatcgccgtcaaatatcacagccccgtcaagaccggcgatttcaagaaacagatttttcctgctcgtcaaccgcgcgttcatgccgaggcggatatctcgtattaccggggagagcatagcgcgcgccgtgtcgggcgtgggcgcgattcctcctattatcgactgtttattaaccacgtgttcgataactttatggtcaggatcgtacactagcaaagctccgtgacgcatgtaactgaggtcaaacatcagctcgaaaagatttcttccgacgttgatgtcgcccataatgtcgcacacgctgtttttgaacgtttgggcgtcatacacgcgccatcgtcccttcctattcgcggcaagaagtccgcgcgagtccattatgaagatgtctccacgctgtcgcagatgaactgagaattctccgcttttcaggattgaggcgaatggctcaagaaactcgggaataaacttcggctcaaaagactcgctgacatccttccacaagatttcctgatagtctaaaaacctcagttctctgtccacgcgaaaatagacttgcatgctcgacgcaagaggatctacaatcttttgaatcgaagcgtcagacagcgacaacgcgccctctccctccccgatcacgatgttagtcatcacccgattgttctcgtaggttctgaacctgacatcctcgatgtatgcgataaacttgttccagttaacgcccgcgtcgaatatctcaagccatcgcaccgcgatatcctcttcgacctgttgcagtgagcgtggggtcggcacgactggcatccttgctctccagatatcgagattgttctgaatatatgatattagcgatctcaaattcggggttaacggattgtgagagcaaaatacgactgtgtgagcgcccattgtcaattcgaacgcatgattcgcatgctcgcttgaataccagtgcgggaccgtcgagacagcggccttcattatgatgcgttcataagatagcatttttcaatatccaatgttaaatgaatctctgaagaatgcgacctgccggagtttgcgcgataatgtgatgtctaatcattcaagactttgtatatgattgttatatcgcggataaccggcacagcttttttcatgaaaaattccttcaatgtggcttttcgcttaggaacgttgatgacatcgccgggacgcagcgacgggatgtcccccgtcgtccggttcagattccccgcctcgattatctcaggtcgttcagggtagtttcgcgttatcgtcaccccgctgtcggcggcgttcgccgcaaacccgcctgagcgcgttatgatgtctagaatcgtctgcccctcgacataaggataaattccgggagtgttgatatatcccgtcacagttatggactctttcttcgcgggctttacaagcacgacatcgttaggaagaagctcgaatccgtccggaggatttctgactgaaaccgaactcatctcgccttgtcgtatcaatgtcacttccgatgagaatatctgcgcgtcaagggccttcgccgcggctagaagtccgattaagttggctgcgttttccggaatcgggtagaaacccggctccggaacatctcccagcacctacactgaagtcgttccatgatatgaaacataaatggcgtcgccgtctatgagttgaaaagtttccgcgctcggcggcgatatcgagcctcgtttcagcgccaccggcatggacacgccgcttctgacgacgaatactttgcgttcatccattctaggatgcgcgagccgcgcctgcgcgaggagtttgtacatcatatacgggtctgtgagttcgtaaggccccggcgctgtgatttcgccaaggatataaacttgcggcttgtgaaacctcgtcacaagcaacgaaaccttcgggtcttttatgcgcgcggcaatcgtctgttccagttccgcgcgtatttgctccgttgtctttccgagcgcgtacatgtcttctatcagcggaaacgatatcatgccgtcgggcctgccggtcactgtttttaaaaggtcttcattgccgtaaaccgatatctccatctcgtcattcatgtgtatccggtaaacatccatcaccggattctcgccgattgcgccggctcgcgcgagcgtatacgccgccagcacggctgttgccgttaggctagccaacaacataatgcgcgagcgattcattgtcataacctccagaatttctagttgcggactgcggcctgcgcgccgagcggcgccacagtcgcggcgaactatacttgtgatgacaaccctctaaggtctgcgacttgcttgcgaagactgcggttttccgcgcgggcgtccgctctcggtccgagaaatataaaatattcaaccgcgactccgagaataccactgccaataatcagcagaggcagtttcacgctcatagtcgccaccagaagatttatcgtggtgtcggtattgttgacaagcgcgagaatgacgctgattgtcaaaacaaccgtgccgagcatgaaccagatgttttcccagaaacgtctgcgttgcggcgtcgcctcaagcttagcctcggctatggcgttttccgcgtcttgcgcttgctttatgtcgttttttcctgtcatgcgttctccttttttgcggacgcggagcttatccctcaatgtccacaacgactccttcctccgccgcaagcgaattaatgattttattcaggtcttccccggtcacgtccagaaacggaatgtcttctgtttgcttgataacaatcccttttttctcgccgataagctgtatgcgaaatccgctgttctttgcccacactctgacagagaaaggctgtttgcgctcgatcatgctttcattgaacttcgacactgcgtccagcgccgtgttccagagcgctgattttggccgggctggcagcggcaagcctgtattgcgatacagaaaactgtcgccgtcggcggcgattccggttttgcgccccactttttttcccactacgcgcgagaccgggctgacggtcgaagtctgatcgattctatctacgctgtcgattgaatcagagccgagcgtgcgggtgaactgatctcccataggattctccttttttcgaacgtcaagcggccggtctcgatcaaggcccgcggctgctattgtttaagtagaagccccgcagttgtagcttccgtcttttcgccgactgtcacggcttcgttcttagcgcttgctttaggcggccgaaaaacgaaatcgtctctcgaacatgccgccatgtgcatcagggccgcgccttcgctcagtatgattccgccggatttcacggaagcgaagaaaccggctccttcgcctttgcccccggtcgatttaatcggattgattttaatcagttttatctttgcgaacgcgtcttgcgcaagcgtcagttcgggcggtcgccgtctatcctgttcctcgtctaggacgaccctcgtcaacaccgcttccatcgcgtaagatttaagcagattcggaaagatatccgcaaacacgccgtgattgtaaaataaatcaagataccaccatgtgcggtcgatgaaaacaacccagccgacctgcgcctccgtaaactctatgcgcgagacgtactcatcgtgaaggatatccctctccgcgtatagcgcgcagatatcgtagttttcggtctttatagacgaccgctcaaaaaggccttcgatatgcttccataccatattttgatccaccctcgacgcgccttctttgatcatcgtcggaaacgacttctcaaggcgctctcgccggaggctcgccggagcgaaatccgagcggtaaaaagcggggtcggtcgccgttattctcgaagctcccccagagagcgcctcgcattcccagcggctcgcctcgacgctgacagcgggtaaaacaacgctttcacccggtcgaataaccgcgctcgccgtcagcattctgttagccgctcctccgatcaggattgccccgtccagcgccagcgcgggcgtgtcgccgctgttctctatgcttaccgaattcattttgcctgtttccatcgcttttatgccgtcgccgagttctcccgcgcctatgacggtgaaaagctctttcgcctcgaaggcgggcgaaaccaacgtcagagggaatacggcaagtcctccgtattccctcatgtcttgcactttgaggtagtccatgaatattgaaggcgtcggcatgattttctccttcagcccgagtttcgcgttgccgttcagtctttttctgaagcgtctttttttgcggcaaaccgctctttagcattgccgacagcggcggctgttttatcgtgcgcatgcgagaccatgctttttgcttcgccgcaaacgtcgcagaccttgtcagacacatcgtcccattattccctgatggcggcagtagtttctttgccgcttgcaggcgctagaagaagcgccgctccggcccccgctatcgctcccgctccgaagcctatcaaagcgcgccacacattagtcctcttctgcgcgttaatatcgttctgtttggatgttcatttcttttctccctttttgatttctaaagcacatgcctataatgaatatttctatcattattctaaattgttcaaccatagcatcctcctgatatcccgccgcgcagagcatatttgttattgcgcaacaaataccttgccgaaagaaacacgacgacaattcgtcccatgaagatgtatgtcaacacattaatgatacgattgattggaatccgggagtatcggcaaaaaagcaatctttattaactattacggcattcatttatagccattccggctaataaacgccgcgcccctctgagccgtaaatgtggttcgaaaaaaggcgttgatattttcaaatgtcagatcgggcgccactcacaaccttgtgcttgagcatcgttaatattcagggattgttaaaaaacttgacactttattcccggaacggcgaaaagcggggacaggcagccgcaaaagacgcgttgcctgtccccgtttttcgctcgaatactcagccagtgaaaaggcacaatttggagtgcggcgatggttctgggtgccaccctgcatacttgagtgaatggcagcaagttggtatcagtcataagaaacgcgtgatttggaatgcgcgattcatcgcctgtttcctgatgaaagcgacatttcgagcggggcaaccccgcccatacataggaataaatgcggcgccaacgaagcagttcgcctatgtgataaagcgttccgactcgccagttcttcagcgaatccttttattgcaatcgagcgattaatacagacgcgcgcgcgcgcctgatattatgatttttcgattagtcctttattaatggcgaaaaacgtcatgtccgaatcttttttcatgtcaagcttccccatgatgcgatacttgaaggttttcaccgtgctgtaggacacgtcaagttcgtcggcgacttcgctcattgtcattccgcgcgccatcctgatgaatatctgatactctctctttgaaagctgggaaagcaggtcgccttctttgtcatggtcgttttgattcgttacggctccatttgaagccgagaaatagatgtctcccgccgcgatttttcttatggccgcgcatagttccatggctgagattttcttgcacaaatagccggccgctccgctcttaataaaacttattgcaaactcttttctgtcgtatatcgtaagaattagaatttttgtgttcagtttcaactcgacgatctgttttgtggcttccagtccgtcaacaaccggcatttcgtaatccagcacaaccacatcgggtttcagctcgccgcacttctgaacagcctcgcgcccgtccgaggcttctccgacaatctccatgtctttttctccgtcaatcagcctgcacaatccggcgcgcaccactccgtggtcgtccgcaaccaaaactcttatcatctttttagcccctccaacgggcttgtgaaccttaattgtttctaccgccgcgtttgcgggttttgatttcttttttgcttttttgccgggcatatcgcttcctccctctttttcctctcatatcggaccgccaatctctttcttcacattgaaaggaatagccacttttatgtgtgttcctcttccgggcgcggaacatatttcaaaccgcccccccatcatgttcgcccgctccctcattccaaggatgccgaaattgtatctgccctgctcgctgtcttcttcaattccgcaaccgctgtccttcacctgaagaacgatttcagaatcagtttccttcaaagatatcaacgcggttttggagcctgaatggcggacaatattcgccagagcctcttgaagtatcctgtacagattgatggcgttgtcaggactgacgcgagactcgtcgacgggcgttatcctagattctatgaagatatcgctggcgttttccaaatccgcaatcaatgttttcatagcggcgttaaaccccattctatccataatcaaagggcgaagaccgagacatatctgttgaagttcttccgacgcttctatcgtctgcttaatcaaattattgtaaacactcacatccgagcatgcgcattcgcggttcctcagccattcgatctcaagttgcatggagatgattttctgtccgatggagtcgtgaagttcgcgcgccacttgtttgcgctcttcttcctgcgattgaatcattctgcgggatagaaacatcaactcccttttcgcaaggctggcttgcgccttcttgcggtctgttatgtcgctcaaaacagcccgataaacaacgggcgtttgcgcgtcgcgcgtcacggaggtttctacttgcgcccacaacagggaaccgtccgcccgcttcgccattatctcgtacgcctgcggctcttttgtctccagtagtttcttgcggcgaaggtagtgcgcgtcctgatattctttagaaataaacgccgaaaacggttttcccaccagttcgcttctagcgacttgtagcagatttgaaacggcgaggttcgcctgaagaattattcccttttcgctgactgataaatatccgaccggggccatgtcgtaaaggtcgtaatattgcgcctgcgacatctctaattcatcctgcgcgcgacgcagttcctcgttctgcatctcgagttcaatctggtgaacgcgcaactcatggagcagttttcttatttcgtcggtggacattaattccagacgctcatgagcgcgctcagcgtttttatcggcttcgacctcggcttttttgcgaagaacagctaacttctcctcttcgcgtttgttatcgttcataatcatttctccttatgcaattcagccgccgctgcggctatcctccgcgcgcttgcgcaggtcatccgccggggcggccctcttgtcttctctgtcagacattattgtcgataccctgtttcaatcgcttacaattgaattgcatcgtttatgtcagccacttttgaatcatgcttatgtattccatattgctgaaaggtttggccaagtgatccattttcggatccctcgtctctaattccatcatggactgcaaatactcgaagttcccagacacgaaaattatcgggatttcggagtctgtttccctgattctttcgtacacctccattccgttcatatccggcaggacgaaatcaaggctgatggcgtcgaaagaattcatgccgtgtcgctccagagccgttttcgcgtcaacagctagggtcggataatgaccgagtttttcaagaagcaaacatagaattcttcccagttgcggttcgtcttcaacaacaagcacgtttttccctttcgcatctttattttcgctggcaaccgccttcctgtcgccgcgggcagcttctgtgattatcggcagcgttattctgaaaatcgcgcccttgtccgcttcgctttcgcactcgacggttcccccgtgcttgtccatgcaacgcttaacatttgaaaggccgtatccggtgccttttacgtccggcgggtaagctccggtcatatccccgctgcctttcaacgagaacaagggatcaaacatcttgtctttccattcacgaggaatgccgcagccattgtcggcaagttcgattcggatgatgttgttttccgcgcgcgtttttatgcgcaacaccggtttttcggttttgctcatagcttgtgtcgcattattgataaggttgatcaaggcgttttcgagaagcccggcgtccgcaatcacgccatccaaacccgctccgtaatcgacgaccacatcgatattcttcaaattgcctctcagcgtcttgataatcatgtctatcttgtcgttaaggctaaatcggcttagtttaagctgctgatccttggcaaagaacaataagttccttgccagcccgcctcctctgtttgcggtttccagaatggtttcgacatctgatttcacgtccggcggcaagtcttgggtcaggagcaattcgctcgttcccaagatgatggttagaacgttgttgaaatcgtgcgccatccgtcccgcaagctggccgatggccgccattttatcctgttcgagatactttctccttgcgtcttcgtgattcttttgttccgtgatgtcgctgagcgcggctcggcacacctgcgcgccatccgcttcgtgcgccacaatcgcatggattcgcgcccagaagaagtcgcggtttttccccgctattcttatttcgcatacctgcgggtcgcctgtttcaaacaattccttgcggtgtctgtagtaaatatcctgatcttcggagagaatgaatccagtcagcggctttttcaacagcgagcttcgagacatgcccagcagtccggcggcggtgagattcgcctccagaataagccccttctcgctgattgtaacgtagccgacaggagcaaggtcgtacaggtcgaaataccgcgcccgcgacgcttcaagttccgcctgcgcgcggcgcagctcttcgttctgcatctcaagctcaatttgatgcacgcgcagttcgtggagcaggcgttttgtttcaccgggggacaactcgtcaagattaacaggagcgccggatgcggcgttttcaagcgctttattctcggcccgcgcgcgaaggtctgcgtccgcttttccccggctattgtcatcgcacattgtcgcccccgttctttttcggcgatgttttttcttcgccggattcagaccggacacatttcccgcgcgcggttattctgacaaatgtgacaaccacgccctcgataacattttccatggttcggtacggcatgattcgcatggtgtacgaatcgcccttcagggtcttcacttcgcgctcttttgggatcagcgtgttcaacacatctcgcgcgtcggcgaccagcccgtcgtatccctcaaggttcgagacgatatgcccgacgggacgccccacatcgctgggtatcaggttgataatctgggtggcggtcggagtgaatcgcatgattcgcagttggtcgtcaacgaatactgtgccgattcccgtgcctgccagcaggttgttcatgtcgttgttggctctcgaaaggtcgatgactttctgctggagttcggcgttgactgtcgcaagttcctcgttcaccgattgcagttcttctttggacgtctcgagttcttcgtttgttgactgaagctcctcatttatcgactgcatttcttcgttcgaagaccttagctcttcgttggatgtctgaagttgctcggtggtggtctgaagatactcatccttggcgcgcaattctttcctcatcgcctccaagcgcgagccgatgtctgttgcgttgtcgaaagcgccgtctgtgtcggcggcgatttctcgcttttcactgtctgatatccgaggctcttcaatgatgacaatgaaaagctcttgcgctgtttccgcgccagtgggcgccggaatgggttttaccgtcagatttaccgtcgtgaagtcgccgtttgttttgacgcgcaggccgtcatggcgcacggcttcctttgagacggcggttttgtgcaaagccgttgttagttcgcggcccaatccctcgcgggccatcttcaacacattggcgacgcctgcgacgccgggcgaaggttccagaaaatggccggctcgtccatgtatgtacaagatgtcgccgccgctgttgactattatgccggtcattgccgcgtgttgaagcagcgccttctcagccaactctcgaagaggcattttatattcatccgttgtttttcttttttggcgggacgaggcttcttccgtcgccgaactcggaagaaagcggctgagggacgcgcgctgcgcgccttgaatgtcatctttgcgccgatatagttttgctttgtggtccacggaggcaaaaaggctcgcgaaatcgccgattgtctcggatgtgccgagaaaaagaaatccgttcggattcaacgcgtaatggaagaggggaatgagctttttctgaaggtctccgcccatatagattagcaggttgcggcaactgatgaggtcgatttttgaaaagggagggtctttgattacattctgttcggagaaaatcaaaatatcgcgaaggcttttgcgaatccgataggagccgccgccgggttcggcctcaaaaaaacgctccagcctctcaggcgagacgtcggcggcgatgctggccggatataggcctgttctggcagtgtcgatggcgtggccatcaatatctgtggcgaacacctgcaatttgaaattttgtttctgttcctcaagtcgctcctgcagcaacatggcgatggaataagcctcttcgccggttgagcatcccagcgaccagacgcgcagcgcggcgcctgcgggcttgcctgcgaagagaagcggcagagcctgtttctccagcgctttgaacgcctcttggtctcggaaaaaactggtaactccaatcagcaggtctcgaaacagggcgtccacctcgtcctttgaccgctgaagatattttatgtattcctctatcttgtctatctggttgacggccatccggcgctcgatccgccgatggatggtattgggcttatattgggaaaagtcatgtccggtctggttgcgcaacaggattaaaacctttttcagcatatcttccggtttagggagagagcctgcggccgggcgcgttgttttgccgaacgcatgggcggcgtaagcgattagttgcggcggcatttcggcgggcggcagaacataatccaccagaccggttgcgatggcgtttctaggcattccgtcgtattcagtggattccgggttctgcgccataaccatgccgccctcgcccttgatcgcccgcactcccagagcgccgtcgctgcccgtgccggagagcactatgcagatagctcgctcgcgctgatcctgcgcaagagagcggaaaaaaaaatcaatgggaagccgctggcctcgcggcgcggccggctccaacagttcaagcgtgccgccgataaaagccatgtcgcgaccgggagggatgatgtatgcgcagtttggctccaccaccatcccgtctttaacttctaataccttcattcgagtatagcgtttgaccaactcggtgaggatgctcttgtgatccggagcaagatgctgcacgaggacaaaagccatatccgggttggcgttcgcgggcatgcctgaaaaaaaagcctcgaacgccgcaagccctcctgccgacgcgccgattccgacgatggggaaatcctttgggaggtcttgttttccattgtctgcggaaacctcatccacaagcgtcttcttgggcgattcagcgggggccttaacatcggtttttatctttctaggcataaaacagtctcctgactagtcggattggccgatagagccggcaaatcttcggcaaatttcataacggcgagatgctttgttgacgtcgcattttttaagcgagaaccttagcctgatttttcctgtgaaaaatccgagttaagtctcttttgctgcaaattgcgcctcgagattcagccgtagaataaccgcgccttaatcccagaaaaggattcggtttgacagaagtgaatcctgtggcgctttccatgttgcgcaaagatgtggttctcagactcaacgaagaggctcttttctttaattgtaactcacttgaaactaactcgcgcgtgaattggaaaatatacttcgccggaatgtgaaagacgcccgtttaatctgcggaagagattgaaatatgccgctttatttcgtcgcgtaaagcggcgccataatttgccttttgcgagtgggctgggttcttgtcggtggaagcgattgccgggggcatagccgagcaggctagctgaaaaaccataaccagtagtcggaaataacacaaatttgtcgaagttacgcattagattcacggaatacatgcgcttgatgcaggccgagtctgtcgttgagcattttctgtatatgatcgtggagaccgtcaacgagggagcgtacgcgctccgtatcgggctcgacgtcgtggcaatcttcgtaataatgtattggcgtgtcgaagtgcaagtcgaactttgacggaaacggcaaaagtccgagcaagcccagccacggaaatatcggcgttatcggcagatgtttgaaccccatcactttcatgtcgagtttgccaattgtcatagcggattcctccgagccggtgacgcatgccgggatgattggagcgcggtactcaatcgcgtattccatgaatccgggggggaacgcgtccactttgtatttgttgaagatggtgtggaagtcgctctccgcgccggtgggaaacacaacaatgaggttttcgttctcgaagattttcattacgttttcgtcgcagccgactatctggccgcaccggttcaagaggatggagccgccggggatgcctgaaagcgccctgtggattattgttctgatgaatcgtggcttctcaagctccaccagcccggcggtccatatcatcacggcgtcgaatgggagtatcggcgcgtggttggacactatcaggccgactccttcggcggggatgttctgcgcgccgtgcgcgtccacgcgaaagtaattcatgtacatgaacagcgccgccgctcccgctttggatgtgacattcaggctggttccgaactcgtcgtatccgcttgggtcaaactgtatgtccgacatcagtatgcggtttctcatatattcggtcgctgtgccgtcgaagaaatgcttgaatttaagttttctgtagtcgtccattgtgttcacaagtcgatttcccctgattgcgatagtttaatcatcctcatcctagctctgggcgcggcgaagtctgattcgatgcgccgcagcgcctttctttttcctttccgcgcggattttctcaaatccggaggggtcgtatcccagttcctcgaacgcgcgcgcgccgtccactgtgaacggatactttatgtaattgagatcgaatttcagattgttcgaccacatgaacctgcctaaacggcgcgcgagaaattcaggaagcggcgccggcgtctttccgaacgagcggataacctcgcttaacggcaggtgtgcgcgccctctgatgttgtacgcgccgtgagcgttcgggctgcgcagaactcgaatgaaagcgtccagcatttcgtcctcgtaaataatctggaacatggggtcgaacccaagaagcgtgggaacaagtttgcctttcatataagcgcctagaatgctggctcctgaatctcgccagatgggaaccatccgcaggatgatcactctgaggctgtcggagctttccgcgtgcgtttggcaaatcatgtccgcctcgatgcggtctctgatgctgaggatgtctcggttgccaagcagaggacggctttcgagaataaccgccgggttgtcctgccttgcgccgtaaacgatggtggagcttggatatatgaactgcttgaccccgtatttgcgcgcaaggccgatcatgtggaacgtcccgtaaacgttcgtcatcatccgttcatcagtagtcaggctctcgccatggccgagggcgagatgcgccacggcgtctatggttccctcgtttttaaacacatcctcgatgcgcttttttcgcgcgtctccgtaaatgcgctttacacccagccacttctcctgtctgtcgtcgtccacgcagatgtcaacgttgacaatgttaatgtcttcgccccactcctcgcgcatcctcacggccagaagttttcctagatatcccgaaccgcctatcatgagcactttcatccgtcgctcccaatgttaacctgcgttggcgaaaaatgccggttaatagagttcttgtttccgaatatctcgttccgcctgtccccagtcctgaacagataggccctcttgtcggcctcgcagttcgtatagttcataggcgcgctttgcaatctgtgggctcaaatcgaccgcattctcgtctctttctgaaatgtcatgcaaaatcccagagagattctctttttctgtgtcgatcttacccttgcttcttgcaacctttttcgacacattacccgcgcgtttttcgatggttcttttgtcactcatgctttttcgtctcctttaatttcgaaatatcgcaatactccaacacgctcccaaaccaaacatattaaacaaactatgagggctgttgctcttttgagattattcgtattagcttaacaataccccaagccacaacagagtacacaataattgcgactaccgttgacggctcaaaaaccgaagtcgtttctatgccttctgaaagccccctgcggaatatgttttcaaaaggcacaatgaaaaatccggttaatccataaatgaatttcacaaagccgctagaaaggttggctcccatcaacttaagaacgaggcggaaaaccaaaagtatttccaaagcgccaaagaagtaatagactgaatatccgcccgtctgataaccggttgccttcttttcagttggagtcgtcacagcgcttgcgtcgccgatttgtgttgtttcagtctcttttacaacattttccatattcgtatcctccgattattattgatgcgtcggcccgcgttggcgaaaatgcggttagcaatccgattgaatactaaagcacaaagacagacgacgcatgcgtctgaaaaccgctgcatagacaacatgttgcatgcgccgtcgtttttgtgtggcccaaatctaaagcggcctcgccagaatcacttgacagctttcttcacgttctttttaatgtcgtgcgctgtgtcaactacggcttcctttactttatcagcctttttcgacactttattcacagctttgtcaacacgttccccgatgcttttcttgttgctcatagttttccgtctccttttattttggtttatcattatcggttcgtaatattctttccttatgcgctatgacttcctcgcccgggaattagctccatcagcctacgggagaggaacgatgatagtgtttgtgtccaaagtaaccgcgccggtgtcgctcgtcgctccggccaatactctgccgtctattctggagccggaaacacaagtgacgcttacgccggccagtatgtttccagtgaagttagcgccggctccaatagtcgcggatgcggaggcaacccaaaacacgttcccggcctgcgcgctgttggtcaccgaaacatttccagcgtttgcagtcagcgaggagccgatcaagaatacccagacggcattcgggtcgcccccgccgtcgagaacaaggtctgtgcttatgttcattgtgctggcggagctatagacgcccggtggaagtgtcagcgcgcccaaatccgcagttccaacgtctgcgtctggcgtcatacctatagcgaagttatacgcgtccaataagtcttgttttgctagaactgacaccgcatcgttaatgtgcgtcgtgccggtcactgtcggacttccggttattgatgcgcccggactcaatgaaacatttccatctatagtggttgcgccggtgttggtgatggtggcggctgccatgactccgaaagcgcaggtcgaaccaagcggaactgcgcccggagtgagttgcatggcaatcgtaaccgtgtcggtggcgctgtttattattccgtcattaactatcaggtcgaaagcgtatattccagtggaagtcggagtgaatgtaggcgtctgcactgtgccgctcgacaatgcaaccgccgggccgccggactgcgtccactcgtaagtgagggggttgccatccgcatccgcgctggcgcttccgtcgagagcgaccgcggcgggaacgcacggcagaatgagcgtttgatccgcccccgcatcggcgaccggcgctatgttgataagataattcacatgcgtattcgttgcgatgtcgtccgcgttgagcgatgtgtcgcggcaggcaatatagacagttacagcgcccgatgcgagacccgacgttgcgcagctctggctcattgtgccgtcgccgtcgcagtcgtcggccatgtctccgtatgcctgatcggcaagcgaccatttgcaatcagcgttctcattcgtgttgaacgtaatcgtcggcgagtgggttgcaagcgtcgaatctttcgcaggatcccaagcgctctgaacaggcggcgttatatccgcggttgtaaattcccacgtgtaatcagacgccgacgcaaccacggatgcgaactgagcgaccacggcaaacatcgctatgaaaatgagggctttgacggcgccgcagcgcccggccttgcggctgcccctgtgaacggaattgattattcttctaatagaatgtttcataatattcttccatgttttgtgtattgcaaacatttcactttatcaaagacacatagacgatgtttctaaacttctgactccctgttgcccgcatcgggcaatataagaaatcctttagttgccgaccaactcattgccggccacatccttggctccggcggggcctgttttgatcgtggcggtgtaagtggtcaattcatcgagagcgctgtcaggcgtaaaagtcgctgttacatcgacgtacgccacagaacccggaatttccgttactccctgcatcagggtaaatgttgccgtggtgattgtggcgggatccatcgcctcgctgaaggcggcggtgattactttcgtattgattgccacgccggaggcgttgtttaatggaacaacggcagtcacagcgggcgcggcggtgtctgttacaggcggcgggttccattttccggttcctccgcatcccgcaattactataccgatcagaattaaactaaacaaaagataagcacgtcgactcttaaagatattgatgataaacattttcatgaaatctttcataattgtcggcgatacatatcccttcgccttttgttattctctatgcataaattatctgaaatatcagaagccaatgatatcggcggaaaagcattcttgattaactcttatggcttgttgttgtaaccatattggctagcgagagtcgaatgttgtattgattagttgatcctactgtccgatatttgcaacctcaaatatttcaacaggaaacgactttcctttgagttgaaccggcgctaatgcgcgtaacgttatttttccttcaacccgcagcaaagcattctttgtgattaggatttgtccggcgcgcgctattgactctaccctctgtgcggtgttcacgacgtcgcctatgatcgtgtaatccattgtttcttcagttcctatgtttccgacaaccgcctcgccgtagtttatccctatgccgattcccagttttttcaactccggcggccagtcgcgttttaattcttcgaaagctctttgcatttccaaagcggcccgaattgcccatagcgtttcattttcgacaaaaaatgtattttttacgttcctctcgatgtctttggaggaccctatgcagcgggatgtttcaagtaaacgcggaaaagacttcagataatacggtccgaacggaaaaggcggtgcgaaaaaagcgcgataaacaaaaggttgttgacgggcgcggcagggcgtaactgcggataatacgcattatctgaagttcgaacgcaatcataaacatcattatataaaggcatatttgagcatttgcgcggcagcgcgggaggcgttctgcggtgtcgtttcattcaaattgacataaattaattcttgtcaaacgcgcttgaaacggggcgtttccggcatggttttcagtcgttttttaaccccgaaaagggccgcaaaaggggcgtttttcgtttgtttttacaaacgcggttttaacaggttttttaacgtgttttaacgggattcacactggtttcaatagcgtttacaccgttgtgactgtcacggtgtgaaaagactgattcaggcgacagcgatggccgctttggcgttttggagagcgatttgggacatgaattaatttatgtcatacgaaacgactcatgcggaaatgggtcggtcgcgcgctttatgctgacaaatgaggcgcgcaacccgacagttattaatgacccgccttctgacagtaatggtttctgtaaaaacaatcaagctgtctgtgaaataaataagctttataataaagcctataatcgttagcggcttcttctatgcatactcgtgacgaaacgtttcaaaagttttccctttttcttccccgcaagaatctttcgctcatgccgcttccgcgcgcgtgagcggcgcgcctgcgctataatattcaacgcgggcggcgggcagccgcgcctcgcggggagacgccgggattatgaccaaagacaaattgttgttgattgacacgttcggccttatatacaggttctatcacaccatgcccaagatgaagacggcggagggaattcccaccggggcggtgttcggcatggcgcgcgcgctgctgaagatttttaaagataataagcccgactatctggtggtggcgatggagtccgagacacccactttcaggcatgccgaatatgccgcctacaaagctcacagggacagaatgccggacgagttgcgggaacagattccggccatcaacgagcttatctccgctttcggtataactccggccaagctcgacgggtacgaggcggacgatgtgatcggcactctggcgcgggcgggcgcggaacacggccttgaggtcgatattcttacaggcgatagagatatgttccagttggtgaacgacagcgtatcagtgctgatgtcgctgaaaggctcctcagagcttgagaagttcgaccgcgaggcggttaaagaaaaaatgggcgtttatccggaacgcatacccgacctcaaagggcttgaaggcgacagttcggacaacatccccggagtgccgggcgtcggccccaaaacagcggtgtctctgctcgaacaattcggagatatggacgccgtgttcgactctcttgaacagattgacaagaaagggctgcgggaaaaactggcggctaacagggaacttgcggaactgagcagaaggctcggcacgatagagaaacacgcgccgctcccatttgaaatcggcgcgtacaaactcccggcggtcgacaacgaaaagcttgcggcgttcttcgagaaatatgaaatgagaagtttcatatcggagcttggaatgaaagaggaggcggccgccccgccccgccccgccgccgttcagttcgactcggtttataaggctgtcttcgacgaagccgaagtcatcgaagcgcttgagcgcgccgcctcgcgcggcaggctttgcgtagacctcgaaaccgacgggctggacaccttcgccgaccccatagtgggcatcgctctggcttccgaggccggcgacgccatctacatccccattcgacacggctccaccgtgaaacgcggcggcggcgaccttttcggcggcggcgacggctcggacgatgaagacgactccgacccggacgctgaaaaacagatagacccggaccgcgcaatcgctttgttgaaaccgtatctggaaaaccctgacatagaaaaaatcggccacaacctcaaattcgacgcgcagatgcttcgcgcggctggcgtgtctcttgccaacatcgcttacgactcattcatcgccgcttaccttatagacccggacggccgcagatacgggctgaaaacggtcgcggcgaacctgctgggagcgggcctgaaaacatacgaggatatggtcggcaagggaaaatctcagaagaaattctctgaggtcaagataagggacgcggtggattacgcctgcgctgacgtggacgccgcgttgaggatcgagccggagctttcgaggcggctggccgcagacggcctcgaccgcgtgttcaggaaaatcgagatgccccttatcccggtattggccgagatggagtggaacggagtggctctggacgcgtccgcgctcgcggggatgtccgaagacttcgccgcaagagagcgggcgctgagcgcggcggtggcggagcttgccggggcggatgtcaacctgaattccccgaaacaggtggccgagttgctgttcgtaaaactcggcctcagaaaagtcaagaaagaatccaccgacatagccgtcctcgaacagcttaaatgcgaccacccggcggtcccgctgataataaagttccggcaggcgagcaagcttcgcggcacatacatagacgctctgcccgcgctgataaacccgcgcacgggcagagtccacacgagcttcaaccagacgctggccgcgtcaggcagattgtcaagcagcaaccctaacatgcagaacatcccggtgcgctccgaggatgggcgcgagatcaggcgcgcgttcatccccggctccaaaggcctcgcccttgtctccgccgactactcccagatcgagatacggctcctcgccgagatgtccggcgacccttccctgctcgaagcgttccgcaaccgggaagacattcacgcgtccgtcgccgctcaggtgttcggagtccccgtctcggaagtgacgcaggaccagcgcagatacgcgaagacaatcaacttcggcctcatatacgggatgcgcgagttcaggctttcacaggagcttggcatctcccggcagcaggccgccgacttcatagaaacttatttctcgcggttccccggcgttcgcgacttcatagagaaaacaaacgaaaaactcctcgaagacggtttcgcagagacgctgttcggacgccgccgccgcgtgccggaactgaggtcttccaaccggcaggagcgcgaagcgggattgcgcgcggctttcaacacccgcattcaaggctctgcggcggacattatgaaactcgccatgatcgacgttcacaagatgatactcgcgggcgagatggacgctaaaatgctccttcaggttcatgacgaaatcgtgcttgaaacgcctgccgaaaaagtggcggacacggcggagaaaacccgcagagcaatggaagcagcgggccgcgattggggcgctctatccgtcgaacttccggcagacgtcaaagccgggccgaactggctcgacatggaaacggtttatacatgttattagatgattctacccactaccaagtgtgccatgcgcaaaactttttcttttgcgcatgatgcttttcaccaaatag

SEQ ID NO: 950 - DNA, 157140 bp, Artificial Sequence
  Synthetic Oligonucleotide
  misc_feature (1)..(40681): n is a, c, g, or t
nnnnnnnnnnnnnnnnnnnnnnnnnnnnnnnnnnnnnnnnnnnnnnnnnnnnnnnnnnnnnnnnnnnnnnnnnnnnnnnnnnnnnnnnnnnnnnnnnnnnnnnnnnnnnnnnnnnnnnnnnnnnnnnnnnnnnnnnnnnnnnnnnnnnnnnnnnnnnnnnnnnnnnnnnnnnnnnnnnnnnnnnnnnnnnnnnnnnnnnnnnnnnnnnnnnnnnnnnnnnnnnnnnnnnnnnnnnnnnnnnnnnnnnnnnnnnnnnnnnnnnnnnnnnnnnnnnnnnnnnnnnnnnnnnnnnnnnnnnnnnnnnnnnnnnnnnnnnnnnnnnnnnnnnnnnnnnnnnnnnnnnnnnnnnnnnnnnnnnnnnnnnnnnnnnnnnnnnnnnnnnnnnnnnnnnnnnnnnnnnnnnnnnnnnnnnnnnnnnnnnnnnnnnnnnnnnnnnnnnnnnnnnnnnnnnnnnnnnnnnnnnnnnnnnnnnnnnnnnnnnnnnnnnnnnnnnnnnnnnnnnnnnnnnnnnnnnnnnnnnnnnnnnnnnnnnnnnnnnnnnnnnnnnnnnnnnnnnnnnnnnnnnnnnnnnnnnnnnnnnnnnnnnnnnnnnnnnnnnnnnnnnnnnnnnnnnnnnnnnnnnnnnnnnnnnnnnnnnnnnnnnnnnnnnnnnnnnnnnnnnnnnnnnnnnnnnnnnnnnnnnnnnnnnnnnnnnnnnnnnnnnnnnnnnnnnnnnnnnnnnnnnnnnnnnnnnnnnnnnnnnnnnnnnnnnnnnnnnnnnnnnnnnnnnnnnnnnnnnnnnnnnnnnnnnnnnnnnnnnnnnnnnnnnnnnnnnnnnnnnnnnnnnnnnnnnnnnnnnnnnnnnnnnnnnnnnnnnnnnnnnnnnnnnnnnnnnnnnnnnnnnnnnnnnnnnnnnnnnnnnnnnnnnnnnnnnnnnnnnnnnnnnnnnnnnnnnnnnnnnnnnnnnnnnnnnnnnnnnnnnnnnnnnnnnnnnnnnnnnnnnnnnnnnnnnnnnnnnnnnnnnnnnnnnnnnnnnnnnnnnnnnnnnnnnnnnnnnnnnnnnnnnnnnnnnnnnnnnnnnnnnnnnnnnnnnnnnnnnnnnnnnnnnnnnnnnnnnnnnnnnnnnnnnnnnnnnnnnnnnnnnnnnnnnnnnnnnnnnnnnnnnnnnnnnnnnnnnnnnnnnnnnnnnnnnnnnnnnnnnnnnnnnnnnnnnnnnnnnnnnnnnnnnnnnnnnnnnnnnnnnnnnnnnnnnnnnnnnnnnnnnnnnnnnnnnnnnnnnnnnnnnnnnnnnnnnnnnnnnnnnnnnnnnnnnnnnnnnnnnnnnnnnnnnnnnnnnnnnnnnnnnnnnnnnnnnnnnnnnnnnnnnnnnnnnnnnnnnnnnnnnnnnnnnnnnnnnnnnnnnnnnnnnnnnnnnnnnnnnnnnnnnnnnnnnnnnnnnnnnnnnnnnnnnnnnnnnnnnnnnnnnnnnnnnnnnnnnnnnnnnnnnnnnnnnnnnnnnnnnnnnnnnnnnnnnnnnnnnnnnnnnnnnnnnnnnnnnnnnnnnnnnnnnnnnnnnnnnnnnnnnnnnnnnnnnnnnnnnnnnnnnnnnnnnnnnnnnnnnnnnnnnnnnnnnnnnnnnnnnnnnnnnnnnnnnnnnnnnnnnnnnnnnnnnnnnnnnnnnnnnnnnnnnnnnnnnnnnnnnnnnnnnnnnnnnnnnnnnnnnnnnnnnnnnnnnnnnnnnnnnnnnnnnnnnnnnnnnnnnnnnnnnnnnnnnnnnnnnnnnnnnnnnnnnnnnnnnnnnnnnnnnnnnnnnnnnnnnnnnnnnnnnnnnnnnnnnnnnnnnnnnnnnnnnnnnnnnnnnnnnnnnnnnnnnnnnnnnnnnnnnnnnnnnnnnnnnnnnnnnnnnnnnnnnnnnnnnnnnnnnnnnnnnnnnnnnnnnnnnnnnnnnnnnnnnnnnnnnnnnnnnnnnnnnnnnnnnnnnnnnnnnnnnnnnnnnnnnnnnnnnnnnnnnnnnnnnnnnnnnnnnnnnnnnnnnnnnnnnnnnnnnnnnnnnnnnnnnnnnnnnnnnnnnnnnnnnnnnnnnnnnnnnnnnnnnnnnnnnnnnnnnnnnnnnnnnnnnnnnnnnnnnnnnnnnnnnnnnnnnnnnnnnnnnnnnnnnnnnnnnnnnnnnnnnnnnnnnnnnnnnnnnnnnnnnnnnnnnnnnnnnnnnnnnnnnnnnnnnnnnnnnnnnnnnnnnnnnnnnnnnnnnnnnnnnnnnnnnnnnnnnnnnnnnnnnnnnnnnnnnnnnnnnnnnnnnnnnnnnnnnnnnnnnnnnnnnnnnnnnnnnnnnnnnnnnnnnnnnnnnnnnnnnnnnnnnnnnnnnnnnnnnnnnnnnnnnnnnnnnnnnnnnnnnnnnnnnnnnnnnnnnnnnnnnnnnnnnnnnnnnnnnnnnnnnnnnnnnnnnnnnnnnnnnnnnnnnnnnnnnnnnnnnnnnnnnnnnnnnnnnnnnnnnnnnnnnnnnnnnnnnnnnnnnnnnnnnnnnnnnnnnnnnnnnnnnnnnnnnnnnnnnnnnnnnnnnnnnnnnnnnnnnnnnnnnnnnnnnnnnnnnnnnnnnnnnnnnnnnnnnnnnnnnnnnnnnnnnnnnnnnnnnnnnnnnnnnnnnnnnnnnnnnnnnnnnnnnnnnnnnnnnnnnnnnnnnnnnnnnnnnnnnnnnnnnnnnnnnnnnnnnnnnnnnnnnnnnnnnnnnnnnnnnnnnnnnnnnnnnnnnnnnnnnnnnnnnnnnnnnnnnnnnnnnnnnnnnnnnnnnnnnnnnnnnnnnnnnnnnnnnnnnnnnnnnnnnnnnnnnnnnnnnnnnnnnnnnnnnnnnnnnnnnnnnnnnnnnnnnnnnnnnnnnnnnnnnnnnnnnnnnnnnnnnnnnnnnnnnnnnnnnnnnnnnnnnnnnnnnnnnnnnnnnnnnnnnnnnnnnnnnnnnnnnnnnnnnnnnnnnnnnnnnnnnnnnnnnnnnnnnnnnnnnnnnnnnnnnnnnnnnnnnnnnnnnnnnnnnnnnnnnnnnnnnnnnnnnnnnnnnnnnnnnnnnnnnnnnnnnnnnnnnnnnnnnnnnnnnnnnnnnnnnnnnnnnnnnnnnnnnnnnnnnnnnnnnnnnnnnnnnnnnnnnnnnnnnnnnnnnnnnnnnnnnnnnnnnnnnnnnnnnnnnnnnnnnnnnnnnnnnnnnnnnnnnnnnnnnnnnnnnnnnnnnnnnnnnnnnnnnnnnnnnnnnnnnnnnnnnnnnnnnnnnnnnnnnnnnnnnnnnnnnnnnnnnnnnnnnnnnnnnnnnnnnnnnnnnnnnnnnnnnnnnnnnnnnnnnnnnnnnnnnnnnnnnnnnnnnnnnnnnnnnnnnnnnnnnnnnnnnnnnnnnnnnnnnnnnnnnnnnnnnnnnnnnnnnnnnnnnnnnnnnnnnnnnnnnnnnnnnnnnnnnnnnnnnnnnnnnnnnnnnnnnnnnnnnnnnnnnnnnnnnnnnnnnnnnnnnnnnnnnnnnnnnnnnnnnnnnnnnnnnnnnnnnnnnnnnnnnnnnnnnnnnnnnnnnnnnnnnnnnnnnnnnnnnnnnnnnnnnnnnnnnnnnnnnnnnnnnnnnnnnnnnnnnnnnnnnnnnnnnnnnnnnnnnnnnnnnnnnnnnnnnnnnnnnnnnnnnnnnnnnnnnnnnnnnnnnnnnnnnnnnnnnnnnnnnnnnnnnnnnnnnnnnnnnnnnnnnnnnnnnnnnnnnnnnnnnnnnnnnnnnnnnnnnnnnnnnnnnnnnnnnnnnnnnnnnnnnnnnnnnnnnnnnnnnnnnnnnnnnnnnnnnnnnnnnnnnnnnnnnnnnnnnnnnnnnnnnnnnnnnnnnnnnnnnnnnnnnnnnnnnnnnnnnnnnnnnnnnnnnnnnnnnnnnnnnnnnnnnnnnnnnnnnnnnnnnnnnnnnnnnnnnnnnnnnnnnnnnnnnnnnnnnnnnnnnnnnnnnnnnnnnnnnnnnnnnnnnnnnnnnnnnnnnnnnnnnnnnnnnnnnnnnnnnnnnnnnnnnnnnnnnnnnnnnnnnnnnnnnnnnnnnnnnnnnnnnnnnnnnnnnnnnnnnnnnnnnnnnnnnnnnnnnnnnnnnnnnnnnnnnnnnnnnnnnnnnnnnnnnnnnnnnnnnnnnnnnnnnnnnnnnnnnnnnnnnnnnnnnnnnnnnnnnnnnnnnnnnnnnnnnnnnnnnnnnnnnnnnnnnnnnnnnnnnnnnnnnnnnnnnnnnnnnnnnnnnnnnnnnnnnnnnnnnnnnnnnnnnnnnnnnnnnnnnnnnnnnnnnnnnnnnnnnnnnnnnnnnnnnnnnnnnnnnnnnnnnnnnnnnnnnnnnnnnnnnnnnnnnnnnnnnnnnnnnnnnnnnnnnnnnnnnnnnnnnnnnnnnnnnnnnnnnnnnnnnnnnnnnnnnnnnnnnnnnnnnnnnnnnnnnnnnnnnnnnnnnnnnnnnnnnnnnnnnnnnnnnnnnnnnnnnnnnnnnnnnnnnnnnnnnnnnnnnnnnnnnnnnnnnnnnnnnnnnnnnnnnnnnnnnnnnnnnnnnnnnnnnnnnnnnnnnnnnnnnnnnnnnnnnnnnnnnnnnnnnnnnnnnnnnnnnnnnnnnnnnnnnnnnnnnnnnnnnnnnnnnnnnnnnnnnnnnnnnnnnnnnnnnnnnnnnnnnnnnnnnnnnnnnnnnnnnnnnnnnnnnnnnnnnnnnnnnnnnnnnnnnnnnnnnnnnnnnnnnnnnnnnnnnnnnnnnnnnnnnnnnnnnnnnnnnnnnnnnnnnnnnnnnnnnnnnnnnnnnnnnnnnnnnnnnnnnnnnnnnnnnnnnnnnnnnnnnnnnnnnnnnnnnnnnnnnnnnnnnnnnnnnnnnnnnnnnnnnnnnnnnnnnnnnnnnnnnnnnnnnnnnnnnnnnnnnnnnnnnnnnnnnnnnnnnnnnnnnnnnnnnnnnnnnnnnnnnnnnnnnnnnnnnnnnnnnnnnnnnnnnnnnnnnnnnnnnnnnnnnnnnnnnnnnnnnnnnnnnnnnnnnnnnnnnnnnnnnnnnnnnnnnnnnnnnnnnnnnnnnnnnnnnnnnnnnnnnnnnnnnnnnnnnnnnnnnnnnnnnnnnnnnnnnnnnnnnnnnnnnnnnnnnnnnnnnnnnnnnnnnnnnnnnnnnnnnnnnnnnnnnnnnnnnnnnnnnnnnnnnnnnnnnnnnnnnnnnnnnnnnnnnnnnnnnnnnnnnnnnnnnnnnnnnnnnnnnnnnnnnnnnnnnnnnnnnnnnnnnnnnnnnnnnnnnnnnnnnnnnnnnnnnnnnnnnnnnnnnnnnnnnnnnnnnnnnnnnnnnnnnnnnnnnnnnnnnnnnnnnnnnnnnnnnnnnnnnnnnnnnnnnnnnnnnnnnnnnnnnnnnnnnnnnnnnnnnnnnnnnnnnnnnnnnnnnnnnnnnnnnnnnnnnnnnnnnnnnnnnnnnnnnnnnnnnnnnnnnnnnnnnnnnnnnnnnnnnnnnnnnnnnnnnnnnnnnnnnnnnnnnnnnnnnnnnnnnnnnnnnnnnnnnnnnnnnnnnnnnnnnnnnnnnnnnnnnnnnnnnnnnnnnnnnnnnnnnnnnnnnnnnnnnnnnnnnnnnnnnnnnnnnnnnnnnnnnnnnnnnnnnnnnnnnnnnnnnnnnnnnnnnnnnnnnnnnnnnnnnnnnnnnnnnnnnnnnnnnnnnnnnnnnnnnnnnnnnnnnnnnnnnnnnnnnnnnnnnnnnnnnnnnnnnnnnnnnnnnnnnnnnnnnnnnnnnnnnnnnnnnnnnnnnnnnnnnnnnnnnnnnnnnnnnnnnnnnnnnnnnnnnnnnnnnnnnnnnnnnnnnnnnnnnnnnnnnnnnnnnnnnnnnnnnnnnnnnnnnnnnnnnnnnnnnnnnnnnnnnnnnnnnnnnnnnnnnnnnnnnnnnnnnnnnnnnnnnnnnnnnnnnnnnnnnnnnnnnnnnnnnnnnnnnnnnnnnnnnnnnnnnnnnnnnnnnnnnnnnnnnnnnnnnnnnnnnnnnnnnnnnnnnnnnnnnnnnnnnnnnnnnnnnnnnnnnnnnnnnnnnnnnnnnnnnnnnnnnnnnnnnnnnnnnnnnnnnnnnnnnnnnnnnnnnnnnnnnnnnnnnnnnnnnnnnnnnnnnnnnnnnnnnnnnnnnnnnnnnnnnnnnnnnnnnnnnnnnnnnnnnnnnnnnnnnnnnnnnnnnnnnnnnnnnnnnnnnnnnnnnnnnnnnnnnnnnnnnnnnnnnnnnnnnnnnnnnnnnnnnnnnnnnnnnnnnnnnnnnnnnnnnnnnnnnnnnnnnnnnnnnnnnnnnnnnnnnnnnnnnnnnnnnnnnnnnnnnnnnnnnnnnnnnnnnnnnnnnnnnnnnnnnnnnnnnnnnnnnnnnnnnnnnnnnnnnnnnnnnnnnnnnnnnnnnnnnnnnnnnnnnnnnnnnnnnnnnnnnnnnnnnnnnnnnnnnnnnnnnnnnnnnnnnnnnnnnnnnnnnnnnnnnnnnnnnnnnnnnnnnnnnnnnnnnnnnnnnnnnnnnnnnnnnnnnnnnnnnnnnnnnnnnnnnnnnnnnnnnnnnnnnnnnnnnnnnnnnnnnnnnnnnnnnnnnnnnnnnnnnnnnnnnnnnnnnnnnnnnnnnnnnnnnnnnnnnnnnnnnnnnnnnnnnnnnnnnnnnnnnnnnnnnnnnnnnnnnnnnnnnnnnnnnnnnnnnnnnnnnnnnnnnnnnnnnnnnnnnnnnnnnnnnnnnnnnnnnnnnnnnnnnnnnnnnnnnnnnnnnnnnnnnnnnnnnnnnnnnnnnnnnnnnnnnnnnnnnnnnnnnnnnnnnnnnnnnnnnnnnnnnnnnnnnnnnnnnnnnnnnnnnnnnnnnnnnnnnnnnnnnnnnnnnnnnnnnnnnnnnnnnnnnnnnnnnnnnnnnnnnnnnnnnnnnnnnnnnnnnnnnnnnnnnnnnnnnnnnnnnnnnnnnnnnnnnnnnnnnnnnnnnnnnnnnnnnnnnnnnnnnnnnnnnnnnnnnnnnnnnnnnnnnnnnnnnnnnnnnnnnnnnnnnnnnnnnnnnnnnnnnnnnnnnnnnnnnnnnnnnnnnnnnnnnnnnnnnnnnnnnnnnnnnnnnnnnnnnnnnnnnnnnnnnnnnnnnnnnnnnnnnnnnnnnnnnnnnnnnnnnnnnnnnnnnnnnnnnnnnnnnnnnnnnnnnnnnnnnnnnnnnnnnnnnnnnnnnnnnnnnnnnnnnnnnnnnnnnnnnnnnnnnnnnnnnnnnnnnnnnnnnnnnnnnnnnnnnnnnnnnnnnnnnnnnnnnnnnnnnnnnnnnnnnnnnnnnnnnnnnnnnnnnnnnnnnnnnnnnnnnnnnnnnnnnnnnnnnnnnnnnnnnnnnnnnnnnnnnnnnnnnnnnnnnnnnnnnnnnnnnnnnnnnnnnnnnnnnnnnnnnnnnnnnnnnnnnnnnnnnnnnnnnnnnnnnnnnnnnnnnnnnnnnnnnnnnnnnnnnnnnnnnnnnnnnnnnnnnnnnnnnnnnnnnnnnnnnnnnnnnnnnnnnnnnnnnnnnnnnnnnnnnnnnnnnnnnnnnnnnnnnnnnnnnnnnnnnnnnnnnnnnnnnnnnnnnnnnnnnnnnnnnnnnnnnnnnnnnnnnnnnnnnnnnnnnnnnnnnnnnnnnnnnnnnnnnnnnnnnnnnnnnnnnnnnnnnnnnnnnnnnnnnnnnnnnnnnnnnnnnnnnnnnnnnnnnnnnnnnnnnnnnnnnnnnnnnnnnnnnnnnnnnnnnnnnnnnnnnnnnnnnnnnnnnnnnnnnnnnnnnnnnnnnnnnnnnnnnnnnnnnnnnnnnnnnnnnnnnnnnnnnnnnnnnnnnnnnnnnnnnnnnnnnnnnnnnnnnnnnnnnnnnnnnnnnnnnnnnnnnnnnnnnnnnnnnnnnnnnnnnnnnnnnnnnnnnnnnnnnnnnnnnnnnnnnnnnnnnnnnnnnnnnnnnnnnnnnnnnnnnnnnnnnnnnnnnnnnnnnnnnnnnnnnnnnnnnnnnnnnnnnnnnnnnnnnnnnnnnnnnnnnnnnnnnnnnnnnnnnnnnnnnnnnnnnnnnnnnnnnnnnnnnnnnnnnnnnnnnnnnnnnnnnnnnnnnnnnnnnnnnnnnnnnnnnnnnnnnnnnnnnnnnnnnnnnnnnnnnnnnnnnnnnnnnnnnnnnnnnnnnnnnnnnnnnnnnnnnnnnnnnnnnnnnnnnnnnnnnnnnnnnnnnnnnnnnnnnnnnnnnnnnnnnnnnnnnnnnnnnnnnnnnnnnnnnnnnnnnnnnnnnnnnnnnnnnnnnnnnnnnnnnnnnnnnnnnnnnnnnnnnnnnnnnnnnnnnnnnnnnnnnnnnnnnnnnnnnnnnnnnnnnnnnnnnnnnnnnnnnnnnnnnnnnnnnnnnnnnnnnnnnnnnnnnnnnnnnnnnnnnnnnnnnnnnnnnnnnnnnnnnnnnnnnnnnnnnnnnnnnnnnnnnnnnnnnnnnnnnnnnnnnnnnnnnnnnnnnnnnnnnnnnnnnnnnnnnnnnnnnnnnnnnnnnnnnnnnnnnnnnnnnnnnnnnnnnnnnnnnnnnnnnnnnnnnnnnnnnnnnnnnnnnnnnnnnnnnnnnnnnnnnnnnnnnnnnnnnnnnnnnnnnnnnnnnnnnnnnnnnnnnnnnnnnnnnnnnnnnnnnnnnnnnnnnnnnnnnnnnnnnnnnnnnnnnnnnnnnnnnnnnnnnnnnnnnnnnnnnnnnnnnnnnnnnnnnnnnnnnnnnnnnnnnnnnnnnnnnnnnnnnnnnnnnnnnnnnnnnnnnnnnnnnnnnnnnnnnnnnnnnnnnnnnnnnnnnnnnnnnnnnnnnnnnnnnnnnnnnnnnnnnnnnnnnnnnnnnnnnnnnnnnnnnnnnnnnnnnnnnnnnnnnnnnnnnnnnnnnnnnnnnnnnnnnnnnnnnnnnnnnnnnnnnnnnnnnnnnnnnnnnnnnnnnnnnnnnnnnnnnnnnnnnnnnnnnnnnnnnnnnnnnnnnnnnnnnnnnnnnnnnnnnnnnnnnnnnnnnnnnnnnnnnnnnnnnnnnnnnnnnnnnnnnnnnnnnnnnnnnnnnnnnnnnnnnnnnnnnnnnnnnnnnnnnnnnnnnnnnnnnnnnnnnnnnnnnnnnnnnnnnnnnnnnnnnnnnnnnnnnnnnnnnnnnnnnnnnnnnnnnnnnnnnnnnnnnnnnnnnnnnnnnnnnnnnnnnnnnnnnnnnnnnnnnnnnnnnnnnnnnnnnnnnnnnnnnnnnnnnnnnnnnnnnnnnnnnnnnnnnnnnnnnnnnnnnnnnnnnnnnnnnnnnnnnnnnnnnnnnnnnnnnnnnnnnnnnnnnnnnnnnnnnnnnnnnnnnnnnnnnnnnnnnnnnnnnnnnnnnnnnnnnnnnnnnnnnnnnnnnnnnnnnnnnnnnnnnnnnnnnnnnnnnnnnnnnnnnnnnnnnnnnnnnnnnnnnnnnnnnnnnnnnnnnnnnnnnnnnnnnnnnnnnnnnnnnnnnnnnnnnnnnnnnnnnnnnnnnnnnnnnnnnnnnnnnnnnnnnnnnnnnnnnnnnnnnnnnnnnnnnnnnnnnnnnnnnnnnnnnnnnnnnnnnnnnnnnnnnnnnnnnnnnnnnnnnnnnnnnnnnnnnnnnnnnnnnnnnnnnnnnnnnnnnnnnnnnnnnnnnnnnnnnnnnnnnnnnnnnnnnnnnnnnnnnnnnnnnnnnnnnnnnnnnnnnnnnnnnnnnnnnnnnnnnnnnnnnnnnnnnnnnnnnnnnnnnnnnnnnnnnnnnnnnnnnnnnnnnnnnnnnnnnnnnnnnnnnnnnnnnnnnnnnnnnnnnnnnnnnnnnnnnnnnnnnnnnnnnnnnnnnnnnnnnnnnnnnnnnnnnnnnnnnnnnnnnnnnnnnnnnnnnnnnnnnnnnnnnnnnnnnnnnnnnnnnnnnnnnnnnnnnnnnnnnnnnnnnnnnnnnnnnnnnnnnnnnnnnnnnnnnnnnnnnnnnnnnnnnnnnnnnnnnnnnnnnnnnnnnnnnnnnnnnnnnnnnnnnnnnnnnnnnnnnnnnnnnnnnnnnnnnnnnnnnnnnnnnnnnnnnnnnnnnnnnnnnnnnnnnnnnnnnnnnnnnnnnnnnnnnnnnnnnnnnnnnnnnnnnnnnnnnnnnnnnnnnnnnnnnnnnnnnnnnnnnnnnnnnnnnnnnnnnnnnnnnnnnnnnnnnnnnnnnnnnnnnnnnnnnnnnnnnnnnnnnnnnnnnnnnnnnnnnnnnnnnnnnnnnnnnnnnnnnnnnnnnnnnnnnnnnnnnnnnnnnnnnnnnnnnnnnnnnnnnnnnnnnnnnnnnnnnnnnnnnnnnnnnnnnnnnnnnnnnnnnnnnnnnnnnnnnnnnnnnnnnnnnnnnnnnnnnnnnnnnnnnnnnnnnnnnnnnnnnnnnnnnnnnnnnnnnnnnnnnnnnnnnnnnnnnnnnnnnnnnnnnnnnnnnnnnnnnnnnnnnnnnnnnnnnnnnnnnnnnnnnnnnnnnnnnnnnnnnnnnnnnnnnnnnnnnnnnnnnnnnnnnnnnnnnnnnnnnnnnnnnnnnnnnnnnnnnnnnnnnnnnnnnnnnnnnnnnnnnnnnnnnnnnnnnnnnnnnnnnnnnnnnnnnnnnnnnnnnnnnnnnnnnnnnnnnnnnnnnnnnnnnnnnnnnnnnnnnnnnnnnnnnnnnnnnnnnnnnnnnnnnnnnnnnnnnnnnnnnnnnnnnnnnnnnnnnnnnnnnnnnnnnnnnnnnnnnnnnnnnnnnnnnnnnnnnnnnnnnnnnnnnnnnnnnnnnnnnnnnnnnnnnnnnnnnnnnnnnnnnnnnnnnnnnnnnnnnnnnnnnnnnnnnnnnnnnnnnnnnnnnnnnnnnnnnnnnnnnnnnnnnnnnnnnnnnnnnnnnnnnnnnnnnnnnnnnnnnnnnnnnnnnnnnnnnnnnnnnnnnnnnnnnnnnnnnnnnnnnnnnnnnnnnnnnnnnnnnnnnnnnnnnnnnnnnnnnnnnnnnnnnnnnnnnnnnnnnnnnnnnnnnnnnnnnnnnnnnnnnnnnnnnnnnnnnnnnnnnnnnnnnnnnnnnnnnnnnnnnnnnnnnnnnnnnnnnnnnnnnnnnnnnnnnnnnnnnnnnnnnnnnnnnnnnnnnnnnnnnnnnnnnnnnnnnnnnnnnnnnnnnnnnnnnnnnnnnnnnnnnnnnnnnnnnnnnnnnnnnnnnnnnnnnnnnnnnnnnnnnnnnnnnnnnnnnnnnnnnnnnnnnnnnnnnnnnnnnnnnnnnnnnnnnnnnnnnnnnnnnnnnnnnnnnnnnnnnnnnnnnnnnnnnnnnnnnnnnnnnnnnnnnnnnnnnnnnnnnnnnnnnnnnnnnnnnnnnnnnnnnnnnnnnnnnnnnnnnnnnnnnnnnnnnnnnnnnnnnnnnnnnnnnnnnnnnnnnnnnnnnnnnnnnnnnnnnnnnnnnnnnnnnnnnnnnnnnnnnnnnnnnnnnnnnnnnnnnnnnnnnnnnnnnnnnnnnnnnnnnnnnnnnnnnnnnnnnnnnnnnnnnnnnnnnnnnnnnnnnnnnnnnnnnnnnnnnnnnnnnnnnnnnnnnnnnnnnnnnnnnnnnnnnnnnnnnnnnnnnnnnnnnnnnnnnnnnnnnnnnnnnnnnnnnnnnnnnnnnnnnnnnnnnnnnnnnnnnnnnnnnnnnnnnnnnnnnnnnnnnnnnnnnnnnnnnnnnnnnnnnnnnnnnnnnnnnnnnnnnnnnnnnnnnnnnnnnnnnnnnnnnnnnnnnnnnnnnnnnnnnnnnnnnnnnnnnnnnnnnnnnnnnnnnnnnnnnnnnnnnnnnnnnnnnnnnnnnnnnnnnnnnnnnnnnnnnnnnnnnnnnnnnnnnnnnnnnnnnnnnnnnnnnnnnnnnnnnnnnnnnnnnnnnnnnnnnnnnnnnnnnnnnnnnnnnnnnnnnnnnnnnnnnnnnnnnnnnnnnnnnnnnnnnnnnnnnnnnnnnnnnnnnnnnnnnnnnnnnnnnnnnnnnnnnnnnnnnnnnnnnnnnnnnnnnnnnnnnnnnnnnnnnnnnnnnnnnnnnnnnnnnnnnnnnnnnnnnnnnnnnnnnnnnnnnnnnnnnnnnnnnnnnnnnnnnnnnnnnnnnnnnnnnnnnnnnnnnnnnnnnnnnnnnnnnnnnnnnnnnnnnnnnnnnnnnnnnnnnnnnnnnnnnnnnnnnnnnnnnnnnnnnnnnnnnnnnnnnnnnnnnnnnnnnnnnnnnnnnnnnnnnnnnnnnnnnnnnnnnnnnnnnnnnnnnnnnnnnnnnnnnnnnnnnnnnnnnnnnnnnnnnnnnnnnnnnnnnnnnnnnnnnnnnnnnnnnnnnnnnnnnnnnnnnnnnnnnnnnnnnnnnnnnnnnnnnnnnnnnnnnnnnnnnnnnnnnnnnnnnnnnnnnnnnnnnnnnnnnnnnnnnnnnnnnnnnnnnnnnnnnnnnnnnnnnnnnnnnnnnnnnnnnnnnnnnnnnnnnnnnnnnnnnnnnnnnnnnnnnnnnnnnnnnnnnnnnnnnnnnnnnnnnnnnnnnnnnnnnnnnnnnnnnnnnnnnnnnnnnnnnnnnnnnnnnnnnnnnnnnnnnnnnnnnnnnnnnnnnnnnnnnnnnnnnnnnnnnnnnnnnnnnnnnnnnnnnnnnnnnnnnnnnnnnnnnnnnnnnnnnnnnnnnnnnnnnnnnnnnnnnnnnnnnnnnnnnnnnnnnnnnnnnnnnnnnnnnnnnnnnnnnnnnnnnnnnnnnnnnnnnnnnnnnnnnnnnnnnnnnnnnnnnnnnnnnnnnnnnnnnnnnnnnnnnnnnnnnnnnnnnnnnnnnnnnnnnnnnnnnnnnnnnnnnnnnnnnnnnnnnnnnnnnnnnnnnnnnnnnnnnnnnnnnnnnnnnnnnnnnnnnnnnnnnnnnnnnnnnnnnnnnnnnnnnnnnnnnnnnnnnnnnnnnnnnnnnnnnnnnnnnnnnnnnnnnnnnnnnnnnnnnnnnnnnnnnnnnnnnnnnnnnnnnnnnnnnnnnnnnnnnnnnnnnnnnnnnnnnnnnnnnnnnnnnnnnnnnnnnnnnnnnnnnnnnnnnnnnnnnnnnnnnnnnnnnnnnnnnnnnnnnnnnnnnnnnnnnnnnnnnnnnnnnnnnnnnnnnnnnnnnnnnnnnnnnnnnnnnnnnnnnnnnnnnnnnnnnnnnnnnnnnnnnnnnnnnnnnnnnnnnnnnnnnnnnnnnnnnnnnnnnnnnnnnnnnnnnnnnnnnnnnnnnnnnnnnnnnnnnnnnnnnnnnnnnnnnnnnnnnnnnnnnnnnnnnnnnnnnnnnnnnnnnnnnnnnnnnnnnnnnnnnnnnnnnnnnnnnnnnnnnnnnnnnnnnnnnnnnnnnnnnnnnnnnnnnnnnnnnnnnnnnnnnnnnnnnnnnnnnnnnnnnnnnnnnnnnnnnnnnnnnnnnnnnnnnnnnnnnnnnnnnnnnnnnnnnnnnnnnnnnnnnnnnnnnnnnnnnnnnnnnnnnnnnnnnnnnnnnnnnnnnnnnnnnnnnnnnnnnnnnnnnnnnnnnnnnnnnnnnnnnnnnnnnnnnnnnnnnnnnnnnnnnnnnnnnnnnnnnnnnnnnnnnnnnnnnnnnnnnnnnnnnnnnnnnnnnnnnnnnnnnnnnnnnnnnnnnnnnnnnnnnnnnnnnnnnnnnnnnnnnnnnnnnnnnnnnnnnnnnnnnnnnnnnnnnnnnnnnnnnnnnnnnnnnnnnnnnnnnnnnnnnnnnnnnnnnnnnnnnnnnnnnnnnnnnnnnnnnnnnnnnnnnnnnnnnnnnnnnnnnnnnnnnnnnnnnnnnnnnnnnnnnnnnnnnnnnnnnnnnnnnnnnnnnnnnnnnnnnnnnnnnnnnnnnnnnnnnnnnnnnnnnnnnnnnnnnnnnnnnnnnnnnnnnnnnnnnnnnnnnnnnnnnnnnnnnnnnnnnnnnnnnnnnnnnnnnnnnnnnnnnnnnnnnnnnnnnnnnnnnnnnnnnnnnnnnnnnnnnnnnnnnnnnnnnnnnnnnnnnnnnnnnnnnnnnnnnnnnnnnnnnnnnnnnnnnnnnnnnnnnnnnnnnnnnnnnnnnnnnnnnnnnnnnnnnnnnnnnnnnnnnnnnnnnnnnnnnnnnnnnnnnnnnnnnnnnnnnnnnnnnnnnnnnnnnnnnnnnnnnnnnnnnnnnnnnnnnnnnnnnnnnnnnnnnnnnnnnnnnnnnnnnnnnnnnnnnnnnnnnnnnnnnnnnnnnnnnnnnnnnnnnnnnnnnnnnnnnnnnnnnnnnnnnnnnnnnnnnnnnnnnnnnnnnnnnnnnnnnnnnnnnnnnnnnnnnnnnnnnnnnnnnnnnnnnnnnnnnnnnnnnnnnnnnnnnnnnnnnnnnnnnnnnnnnnnnnnnnnnnnnnnnnnnnnnnnnnnnnnnnnnnnnnnnnnnnnnnnnnnnnnnnnnnnnnnnnnnnnnnnnnnnnnnnnnnnnnnnnnnnnnnnnnnnnnnnnnnnnnnnnnnnnnnnnnnnnnnnnnnnnnnnnnnnnnnnnnnnnnnnnnnnnnnnnnnnnnnnnnnnnnnnnnnnnnnnnnnnnnnnnnnnnnnnnnnnnnnnnnnnnnnnnnnnnnnnnnnnnnnnnnnnnnnnnnnnnnnnnnnnnnnnnnnnnnnnnnnnnnnnnnnnnnnnnnnnnnnnnnnnnnnnnnnnnnnnnnnnnnnnnnnnnnnnnnnnnnnnnnnnnnnnnnnnnnnnnnnnnnnnnnnnnnnnnnnnnnnnnnnnnnnnnnnnnnnnnnnnnnnnnnnnnnnnnnnnnnnnnnnnnnnnnnnnnnnnnnnnnnnnnnnnnnnnnnnnnnnnnnnnnnnnnnnnnnnnnnnnnnnnnnnnnnnnnnnnnnnnnnnnnnnnnnnnnnnnnnnnnnnnnnnnnnnnnnnnnnnnnnnnnnnnnnnnnnnnnnnnnnnnnnnnnnnnnnnnnnnnnnnnnnnnnnnnnnnnnnnnnnnnnnnnnnnnnnnnnnnnnnnnnnnnnnnnnnnnnnnnnnnnnnnnnnnnnnnnnnnnnnnnnnnnnnnnnnnnnnnnnnnnnnnnnnnnnnnnnnnnnnnnnnnnnnnnnnnnnnnnnnnnnnnnnnnnnnnnnnnnnnnnnnnnnnnnnnnnnnnnnnnnnnnnnnnnnnnnnnnnnnnnnnnnnnnnnnnnnnnnnnnnnnnnnnnnnnnnnnnnnnnnnnnnnnnnnnnnnnnnnnnnnnnnnnnnnnnnnnnnnnnnnnnnnnnnnnnnnnnnnnnnnnnnnnnnnnnnnnnnnnnnnnnnnnnnnnnnnnnnnnnnnnnnnnnnnnnnnnnnnnnnnnnnnnnnnnnnnnnnnnnnnnnnnnnnnnnnnnnnnnnnnnnnnnnnnnnnnnnnnnnnnnnnnnnnnnnnnnnnnnnnnnnnnnnnnnnnnnnnnnnnnnnnnnnnnnnnnnnnnnnnnnnnnnnnnnnnnnnnnnnnnnnnnnnnnnnnnnnnnnnnnnnnnnnnnnnnnnnnnnnnnnnnnnnnnnnnnnnnnnnnnnnnnnnnnnnnnnnnnnnnnnnnnnnnnnnnnnnnnnnnnnnnnnnnnnnnnnnnnnnnnnnnnnnnnnnnnnnnnnnnnnnnnnnnnnnnnnnnnnnnnnnnnnnnnnnnnnnnnnnnnnnnnnnnnnnnnnnnnnnnnnnnnnnnnnnnnnnnnnnnnnnnnnnnnnnnnnnnnnnnnnnnnnnnnnnnnnnnnnnnnnnnnnnnnnnnnnnnnnnnnnnnnnnnnnnnnnnnnnnnnnnnnnnnnnnnnnnnnnnnnnnnnnnnnnnnnnnnnnnnnnnnnnnnnnnnnnnnnnnnnnnnnnnnnnnnnnnnnnnnnnnnnnnnnnnnnnnnnnnnnnnnnnnnnnnnnnnnnnnnnnnnnnnnnnnnnnnnnnnnnnnnnnnnnnnnnnnnnnnnnnnnnnnnnnnnnnnnnnnnnnnnnnnnnnnnnnnnnnnnnnnnnnnnnnnnnnnnnnnnnnnnnnnnnnnnnnnnnnnnnnnnnnnnnnnnnnnnnnnnnnnnnnnnnnnnnnnnnnnnnnnnnnnnnnnnnnnnnnnnnnnnnnnnnnnnnnnnnnnnnnnnnnnnnnnnnnnnnnnnnnnnnnnnnnnnnnnnnnnnnnnnnnnnnnnnnnnnnnnnnnnnnnnnnnnnnnnnnnnnnnnnnnnnnnnnnnnnnnnnnnnnnnnnnnnnnnnnnnnnnnnnnnnnnnnnnnnnnnnnnnnnnnnnnnnnnnnnnnnnnnnnnnnnnnnnnnnnnnnnnnnnnnnnnnnnnnnnnnnnnnnnnnnnnnnnnnnnnnnnnnnnnnnnnnnnnnnnnnnnnnnnnnnnnnnnnnnnnnnnnnnnnnnnnnnnnnnnnnnnnnnnnnnnnnnnnnnnnnnnnnnnnnnnnnnnnnnnnnnnnnnnnnnnnnnnnnnnnnnnnnnnnnnnnnnnnnnnnnnnnnnnnnnnnnnnnnnnnnnnnnnnnnnnnnnnnnnnnnnnnnnnnnnnnnnnnnnnnnnnnnnnnnnnnnnnnnnnnnnnnnnnnnnnnnnnnnnnnnnnnnnnnnnnnnnnnnnnnnnnnnnnnnnnnnnnnnnnnnnnnnnnnnnnnnnnnnnnnnnnnnnnnnnnnnnnnnnnnnnnnnnnnnnnnnnnnnnnnnnnnnnnnnnnnnnnnnnnnnnnnnnnnnnnnnnnnnnnnnnnnnnnnnnnnnnnnnnnnnnnnnnnnnnnnnnnnnnnnnnnnnnnnnnnnnnnnnnnnnnnnnnnnnnnnnnnnnnnnnnnnnnnnnnnnnnnnnnnnnnnnnnnnnnnnnnnnnnnnnnnnnnnnnnnnnnnnnnnnnnnnnnnnnnnnnnnnnnnnnnnnnnnnnnnnnnnnnnnnnnnnnnnnnnnnnnnnnnnnnnnnnnnnnnnnnnnnnnnnnnnnnnnnnnnnnnnnnnnnnnnnnnnnnnnnnnnnnnnnnnnnnnnnnnnnnnnnnnnnnnnnnnnnnnnnnnnnnnnnnnnnnnnnnnnnnnnnnnnnnnnnnnnnnnnnnnnnnnnnnnnnnnnnnnnnnnnnnnnnnnnnnnnnnnnnnnnnnnnnnnnnnnnnnnnnnnnnnnnnnnnnnnnnnnnnnnnnnnnnnnnnnnnnnnnnnnnnnnnnnnnnnnnnnnnnnnnnnnnnnnnnnnnnnnnnnnnnnnnnnnnnnnnnnnnnnnnnnnnnnnnnnnnnnnnnnnnnnnnnnnnnnnnnnnnnnnnnnnnnnnnnnnnnnnnnnnnnnnnnnnnnnnnnnnnnnnnnnnnnnnnnnnnnnnnnnnnnnnnnnnnnnnnnnnnnnnnnnnnnnnnnnnnnnnnnnnnnnnnnnnnnnnnnnnnnnnnnnnnnnnnnnnnnnnnnnnnnnnnnnnnnnnnnnnnnnnnnnnnnnnnnnnnnnnnnnnnnnnnnnnnnnnnnnnnnnnnnnnnnnnnnnnnnnnnnnnnnnnnnnnnnnnnnnnnnnnnnnnnnnnnnnnnnnnnnnnnnnnnnnnnnnnnnnnnnnnnnnnnnnnnnnnnnnnnnnnnnnnnnnnnnnnnnnnnnnnnnnnnnnnnnnnnnnnnnnnnnnnnnnnnnnnnnnnnnnnnnnnnnnnnnnnnnnnnnnnnnnnnnnnnnnnnnnnnnnnnnnnnnnnnnnnnnnnnnnnnnnnnnnnnnnnnnnnnnnnnnnnnnnnnnnnnnnnnnnnnnnnnnnnnnnnnnnnnnnnnnnnnnnnnnnnnnnnnnnnnnnnnnnnnnnnnnnnnnnnnnnnnnnnnnnnnnnnnnnnnnnnnnnnnnnnnnnnnnnnnnnnnnnnnnnnnnnnnnnnnnnnnnnnnnnnnnnnnnnnnnnnnnnnnnnnnnnnnnnnnnnnnnnnnnnnnnnnnnnnnnnnnnnnnnnnnnnnnnnnnnnnnnnnnnnnnnnnnnnnnnnnnnnnnnnnnnnnnnnnnnnnnnnnnnnnnnnnnnnnnnnnnnnnnnnnnnnnnnnnnnnnnnnnnnnnnnnnnnnnnnnnnnnnnnnnnnnnnnnnnnnnnnnnnnnnnnnnnnnnnnnnnnnnnnnnnnnnnnnnnnnnnnnnnnnnnnnnnnnnnnnnnnnnnnnnnnnnnnnnnnnnnnnnnnnnnnnnnnnnnnnnnnnnnnnnnnnnnnnnnnnnnnnnnnnnnnnnnnnnnnnnnnnnnnnnnnnnnnnnnnnnnnnnnnnnnnnnnnnnnnnnnnnnnnnnnnnnnnnnnnnnnnnnnnnnnnnnnnnnnnnnnnnnnnnnnnnnnnnnnnnnnnnnnnnnnnnnnnnnnnnnnnnnnnnnnnnnnnnnnnnnnnnnnnnnnnnnnnnnnnnnnnnnnnnnnnnnnnnnnnnnnnnnnnnnnnnnnnnnnnnnnnnnnnnnnnnnnnnnnnnnnnnnnnnnnnnnnnnnnnnnnnnnnnnnnnnnnnnnnnnnnnnnnnnnnnnnnnnnnnnnnnnnnnnnnnnnnnnnnnnnnnnnnnnnnnnnnnnnnnnnnnnnnnnnnnnnnnnnnnnnnnnnnnnnnnnnnnnnnnnnnnnnnnnnnnnnnnnnnnnnnnnnnnnnnnnnnnnnnnnnnnnnnnnnnnnnnnnnnnnnnnnnnnnnnnnnnnnnnnnnnnnnnnnnnnnnnnnnnnnnnnnnnnnnnnnnnnnnnnnnnnnnnnnnnnnnnnnnnnnnnnnnnnnnnnnnnnnnnnnnnnnnnnnnnnnnnnnnnnnnnnnnnnnnnnnnnnnnnnnnnnnnnnnnnnnnnnnnnnnnnnnnnnnnnnnnnnnnnnnnnnnnnnnnnnnnnnnnnnnnnnnnnnnnnnnnnnnnnnnnnnnnnnnnnnnnnnnnnnnnnnnnnnnnnnnnnnnnnnnnnnnnnnnnnnnnnnnnnnnnnnnnnnnnnnnnnnnnnnnnnnnnnnnnnnnnnnnnnnnnnnnnnnnnnnnnnnnnnnnnnnnnnnnnnnnnnnnnnnnnnnnnnnnnnnnnnnnnnnnnnnnnnnnnnnnnnnnnnnnnnnnnnnnnnnnnnnnnnnnnnnnnnnnnnnnnnnnnnnnnnnnnnnnnnnnnnnnnnnnnnnnnnnnnnnnnnnnnnnnnnnnnnnnnnnnnnnnnnnnnnnnnnnnnnnnnnnnnnnnnnnnnnnnnnnnnnnnnnnnnnnnnnnnnnnnnnnnnnnnnnnnnnnnnnnnnnnnnnnnnnnnnnnnnnnnnnnnnnnnnnnnnnnnnnnnnnnnnnnnnnnnnnnnnnnnnnnnnnnnnnnnnnnnnnnnnnnnnnnnnnnnnnnnnnnnnnnnnnnnnnnnnnnnnnnnnnnnnnnnnnnnnnnnnnnnnnnnnnnnnnnnnnnnnnnnnnnnnnnnnnnnnnnnnnnnnnnnnnnnnnnnnnnnnnnnnnnnnnnnnnnnnnnnnnnnnnnnnnnnnnnnnnnnnnnnnnnnnnnnnnnnnnnnnnnnnnnnnnnnnnnnnnnnnnnnnnnnnnnnnnnnnnnnnnnnnnnnnnnnnnnnnnnnnnnnnnnnnnnnnnnnnnnnnnnnnnnnnnnnnnnnnnnnnnnnnnnnnnnnnnnnnnnnnnnnnnnnnnnnnnnnnnnnnnnnnnnnnnnnnnnnnnnnnnnnnnnnnnnnnnnnnnnnnnnnnnnnnnnnnnnnnnnnnnnnnnnnnnnnnnnnnnnnnnnnnnnnnnnnnnnnnnnnnnnnnnnnnnnnnnnnnnnnnnnnnnnnnnnnnnnnnnnnnnnnnnnnnnnnnnnnnnnnnnnnnnnnnnnnnnnnnnnnnnnnnnnnnnnnnnnnnnnnnnnnnnnnnnnnnnnnnnnnnnnnnnnnnnnnnnnnnnnnnnnnnnnnnnnnnnnnnnnnnnnnnnnnnnnnnnnnnnnnnnnnnnnnnnnnnnnnnnnnnnnnnnnnnnnnnnnnnnnnnnnnnnnnnnnnnnnnnnnnnnnnnnnnnnnnnnnnnnnnnnnnnnnnnnnnnnnnnnnnnnnnnnnnnnnnnnnnnnnnnnnnnnnnnnnnnnnnnnnnnnnnnnnnnnnnnnnnnnnnnnnnnnnnnnnnnnnnnnnnnnnnnnnnnnnnnnnnnnnnnnnnnnnnnnnnnnnnnnnnnnnnnnnnnnnnnnnnnnnnnnnnnnnnnnnnnnnnnnnnnnnnnnnnnnnnnnnnnnnnnnnnnnnnnnnnnnnnnnnnnnnnnnnnnnnnnnnnnnnnnnnnnnnnnnnnnnnnnnnnnnnnnnnnnnnnnnnnnnnnnnnnnnnnnnnnnnnnnnnnnnnnnnnnnnnnnnnnnnnnnnnnnnnnnnnnnnnnnnnnnnnnnnnnnnnnnnnnnnnnnnnnnnnnnnnnnnnnnnnnnnnnnnnnnnnnnnnnnnnnnnnnnnnnnnnnnnnnnnnnnnnnnnnnnnnnnnnnnnnnnnnnnnnnnnnnnnnnnnnnnnnnnnnnnnnnnnnnnnnnnnnnnnnnnnnnnnnnnnnnnnnnnnnnnnnnnnnnnnnnnnnnnnnnnnnnnnnnnnnnnnnnnnnnnnnnnnnnnnnnnnnnnnnnnnnnnnnnnnnnnnnnnnnnnnnnnnnnnnnnnnnnnnnnnnnnnnnnnnnnnnnnnnnnnnnnnnnnnnnnnnnnnnnnnnnnnnnnnnnnnnnnnnnnnnnnnnnnnnnnnnnnnnnnnnnnnnnnnnnnnnnnnnnnnnnnnnnnnnnnnnnnnnnnnnnnnnnnnnnnnnnnnnnnnnnnnnnnnnnnnnnnnnnnnnnnnnnnnnnnnnnnnnnnnnnnnnnnnnnnnnnnnnnnnnnnnnnnnnnnnnnnnnnnnnnnnnnnnnnnnnnnnnnnnnnnnnnnnnnnnnnnnnnnnnnnnnnnnnnnnnnnnnnnnnnnnnnnnnnnnnnnnnnnnnnnnnnnnnnnnnnnnnnnnnnnnnnnnnnnnnnnnnnnnnnnnnnnnnnnnnnnnnnnnnnnnnnnnnnnnnnnnnnnnnnnnnnnnnnnnnnnnnnnnnnnnnnnnnnnnnnnnnnnnnnnnnnnnnnnnnnnnnnnnnnnnnnnnnnnnnnnnnnnnnnnnnnnnnnnnnnnnnnnnnnnnnnnnnnnnnnnnnnnnnnnnnnnnnnnnnnnnnnnnnnnnnnnnnnnnnnnnnnnnnnnnnnnnnnnnnnnnnnnnnnnnnnnnnnnnnnnnnnnnnnnnnnnnnnnnnnnnnnnnnnnnnnnnnnnnnnnnnnnnnnnnnnnnnnnnnnnnnnnnnnnnnnnnnnnnnnnnnnnnnnnnnnnnnnnnnnnnnnnnnnnnnnnnnnnnnnnnnnnnnnnnnnnnnnnnnnnnnnnnnnnnnnnnnnnnnnnnnnnnnnnnnnnnnnnnnnnnnnnnnnnnnnnnnnnnnnnnnnnnnnnnnnnnnnnnnnnnnnnnnnnnnnnnnnnnnnnnnnnnnnnnnnnnnnnnnnnnnnnnnnnnnnnnnnnnnnnnnnnnnnnnnnnnnnnnnnnnnnnnnnnnnnnnnnnnnnnnnnnnnnnnnnnnnnnnnnnnnnnnnnnnnnnnnnnnnnnnnnnnnnnnnnnnnnnnnnnnnnnnnnnnnnnnnnnnnnnnnnnnnnnnnnnnnnnnnnnnnnnnnnnnnnnnnnnnnnnnnnnnnnnnnnnnnnnnnnnnnnnnnnnnnnnnnnnnnnnnnnnnnnnnnnnnnnnnnnnnnnnnnnnnnnnnnnnnnnnnnnnnnnnnnnnnnnnnnnnnnnnnnnnnnnnnnnnnnnnnnnnnnnnnnnnnnnnnnnnnnnnnnnnnnnnnnnnnnnnnnnnnnnnnnnnnnnnnnnnnnnnnnnnnnnnnnnnnnnnnnnnnnnnnnnnnnnnnnnnnnnnnnnnnnnnnnnnnnnnnnnnnnnnnnnnnnnnnnnnnnnnnnnnnnnnnnnnnnnnnnnnnnnnnnnnnnnnnnnnnnnnnnnnnnnnnnnnnnnnnnnnnnnnnnnnnnnnnnnnnnnnnnnnnnnnnnnnnnnnnnnnnnnnnnnnnnnnnnnnnnnnnnnnnnnnnnnnnnnnnnnnnnnnnnnnnnnnnnnnnnnnnnnnnnnnnnnnnnnnnnnnnnnnnnnnnnnnnnnnnnnnnnnnnnnnnnnnnnnnnnnnnnnnnnnnnnnnnnnnnnnnnnnnnnnnnnnnnnnnnnnnnnnnnnnnnnnnnnnnnnnnnnnnnnnnnnnnnnnnnnnnnnnnnnnnnnnnnnnnnnnnnnnnnnnnnnnnnnnnnnnnnnnnnnnnnnnnnnnnnnnnnnnnnnnnnnnnnnnnnnnnnnnnnnnnnnnnnnnnnnnnnnnnnnnnnnnnnnnnnnnnnnnnnnnnnnnnnnnnnnnnnnnnnnnnnnnnnnnnnnnnnnnnnnnnnnnnnnnnnnnnnnnnnnnnnnnnnnnnnnnnnnnnnnnnnnnnnnnnnnnnnnnnnnnnnnnnnnnnnnnnnnnnnnnnnnnnnnnnnnnnnnnnnnnnnnnnnnnnnnnnnnnnnnnnnnnnnnnnnnnnnnnnnnnnnnnnnnnnnnnnnnnnnnnnnnnnnnnnnnnnnnnnnnnnnnnnnnnnnnnnnnnnnnnnnnnnnnnnnnnnnnnnnnnnnnnnnnnnnnnnnnnnnnnnnnnnnnnnnnnnnnnnnnnnnnnnnnnnnnnnnnnnnnnnnnnnnnnnnnnnnnnnnnnnnnnnnnnnnnnnnnnnnnnnnnnnnnnnnnnnnnnnnnnnnnnnnnnnnnnnnnnnnnnnnnnnnnnnnnnnnnnnnnnnnnnnnnnnnnnnnnnnnnnnnnnnnnnnnnnnnnnnnnnnnnnnnnnnnnnnnnnnnnnnnnnnnnnnnnnnnnnnnnnnnnnnnnnnnnnnnnnnnnnnnnnnnnnnnnnnnnnnnnnnnnnnnnnnnnnnnnnnnnnnnnnnnnnnnnnnnnnnnnnnnnnnnnnnnnnnnnnnnnnnnnnnnnnnnnnnnnnnnnnnnnnnnnnnnnnnnnnnnnnnnnnnnnnnnnnnnnnnnnnnnnnnnnnnnnnnnnnnnnnnnnnnnnnnnnnnnnnnnnnnnnnnnnnnnnnnnnnnnnnnnnnnnnnnnnnnnnnnnnnnnnnnnnnnnnnnnnnnnnnnnnnnnnnnnnnnnnnnnnnnnnnnnnnnnnnnnnnnnnnnnnnnnnnnnnnnnnnnnnnnnnnnnnnnnnnnnnnnnnnnnnnnnnnnnnnnnnnnnnnnnnnnnnnnnnnnnnnnnnnnnnnnnnnnnnnnnnnnnnnnnnnnnnnnnnnnnnnnnnnnnnnnnnnnnnnnnnnnnnnnnnnnnnnnnnnnnnnnnnnnnnnnnnnnnnnnnnnnnnnnnnnnnnnnnnnnnnnnnnnnnnnnnnnnnnnnnnnnnnnnnnnnnnnnnnnnnnnnnnnnnnnnnnnnnnnnnnnnnnnnnnnnnnnnnnnnnnnnnnnnnnnnnnnnnnnnnnnnnnnnnnnnnnnnnnnnnnnnnnnnnnnnnnnnnnnnnnnnnnnnnnnnnnnnnnnnnnnnnnnnnnnnnnnnnnnnnnnnnnnnnnnnnnnnnnnnnnnnnnnnnnnnnnnnnnnnnnnnnnnnnnnnnnnnnnnnnnnnnnnnnnnnnnnnnnnnnnnnnnnnnnnnnnnnnnnnnnnnnnnnnnnnnnnnnnnnnnnnnnnnnnnnnnnnnnnnnnnnnnnnnnnnnnnnnnnnnnnnnnnnnnnnnnnnnnnnnnnnnnnnnnnnnnnnnnnnnnnnnnnnnnnnnnnnnnnnnnnnnnnnnnnnnnnnnnnnnnnnnnnnnnnnnnnnnnnnnnnnnnnnnnnnnnnnnnnnnnnnnnnnnnnnnnnnnnnnnnnnnnnnnnnnnnnnnnnnnnnnnnnnnnnnnnnnnnnnnnnnnnnnnnnnnnnnnnnnnnnnnnnnnnnnnnnnnnnnnnnnnnnnnnnnnnnnnnnnnnnnnnnnnnnnnnnnnnnnnnnnnnnnnnnnnnnnnnnnnnnnnnnnnnnnnnnnnnnnnnnnnnnnnnnnnnnnnnnnnnnnnnnnnnnnnnnnnnnnnnnnnnnnnnnnnnnnnnnnnnnnnnnnnnnnnnnnnnnnnnnnnnnnnnnnnnnnnnnnnnnnnnnnnnnnnnnnnnnnnnnnnnnnnnnnnnnnnnnnnnnnnnnnnnnnnnnnnnnnnnnnnnnnnnnnnnnnnnnnnnnnnnnnnnnnnnnnnnnnnnnnnnnnnnnnnnnnnnnnnnnnnnnnnnnnnnnnnnnnnnnnnnnnnnnnnnnnnnnnnnnnnnnnnnnnnnnnnnnnnnnnnnnnnnnnnnnnnnnnnnnnnnnnnnnnnnnnnnnnnnnnnnnnnnnnnnnnnnnnnnnnnnnnnnnnnnnnnnnnnnnnnnnnnnnnnnnnnnnnnnnnnnnnnnnnnnnnnnnnnnnnnnnnnnnnnnnnnnnnnnnnnnnnnnnnnnnnnnnnnnnnnnnnnnnnnnnnnnnnnnnnnnnnnnnnnnnnnnnnnnnnnnnnnnnnnnnnnnnnnnnnnnnnnnnnnnnnnnnnnnnnnnnnnnnnnnnnnnnnnnnnnnnnnnnnnnnnnnnnnnnnnnnnnnnnnnnnnnnnnnnnnnnnnnnnnnnnnnnnnnnnnnnnnnnnnnnnnnnnnnnnnnnnnnnnnnnnnnnnnnnnnnnnnnnnnnnnnnnnnnnnnnnnnnnnnnnnnnnnnnnnnnnnnnnnnnnnnnnnnnnnnnnnnnnnnnnnnnnnnnnnnnnnnnnnnnnnnnnnnnnnnnnnnnnnnnnnnnnnnnnnnnnnnnnnnnnnnnnnnnnnnnnnnnnnnnnnnnnnnnnnnnnnnnnnnnnnnnnnnnnnnnnnnnnnnnnnnnnnnnnnnnnnnnnnnnnnnnnnnnnnnnnnnnnnnnnnnnnnnnnnnnnnnnnnnnnnnnnnnnnnnnnnnnnnnnnnnnnnnnnnnnnnnnnnnnnnnnnnnnnnnnnnnnnnnnnnnnnnnnnnnnnnnnnnnnnnnnnnnnnnnnnnnnnnnnnnnnnnnnnnnnnnnnnnnnnnnnnnnnnnnnnnnnnnnnnnnnnnnnnnnnnnnnnnnnnnnnnnnnnnnnnnnnnnnnnnnnnnnnnnnnnnnnnnnnnnnnnnnnnnnnnnnnnnnnnnnnnnnnnnnnnnnnnnnnnnnnnnnnnnnnnnnnnnnnnnnnnnnnnnnnnnnnnnnnnnnnnnnnnnnnnnnnnnnnnnnnnnnnnnnnnnnnnnnnnnnnnnnnnnnnnnnnnnnnnnnnnnnnnnnnnnnnnnnnnnnnnnnnnnnnnnnnnnnnnnnnnnnnnnnnnnnnnnnnnnnnnnnnnnnnnnnnnnnnnnnnnnnnnnnnnnnnnnnnnnnnnnnnnnnnnnnnnnnnnnnnnnnnnnnnnnnnnnnnnnnnnnnnnnnnnnnnnnnnnnnnnnnnnnnnnnnnnnnnnnnnnnnnnnnnnnnnnnnnnnnnnnnnnnnnnnnnnnnnnnnnnnnnnnnnnnnnnnnnnnnnnnnnnnnnnnnnnnnnnnnnnnnnnnnnnnnnnnnnnnnnnnnnnnnnnnnnnnnnnnnnnnnnnnnnnnnnnnnnnnnnnnnnnnnnnnnnnnnnnnnnnnnnnnnnnnnnnnnnnnnnnnnnnnnnnnnnnnnnnnnnnnnnnnnnnnnnnnnnnnnnnnnnnnnnnnnnnnnnnnnnnnnnnnnnnnnnnnnnnnnnnnnnnnnnnnnnnnnnnnnnnnnnnnnnnnnnnnnnnnnnnnnnnnnnnnnnnnnnnnnnnnnnnnnnnnnnnnnnnnnnnnnnnnnnnnnnnnnnnnnnnnnnnnnnnnnnnnnnnnnnnnnnnnnnnnnnnnnnnnnnnnnnnnnnnnnnnnnnnnnnnnnnnnnnnnnnnnnnnnnnnnnnnnnnnnnnnnnnnnnnnnnnnnnnnnnnnnnnnnnnnnnnnnnnnnnnnnnnnnnnnnnnnnnnnnnnnnnnnnnnnnnnnnnnnnnnnnnnnnnnnnnnnnnnnnnnnnnnnnnnnnnnnnnnnnnnnnnnnnnnnnnnnnnnnnnnnnnnnnnnnnnnnnnnnnnnnnnnnnnnnnnnnnnnnnnnnnnnnnnnnnnnnnnnnnnnnnnnnnnnnnnnnnnnnnnnnnnnnnnnnnnnnnnnnnnnnnnnnnnnnnnnnnnnnnnnnnnnnnnnnnnnnnnnnnnnnnnnnnnnnnnnnnnnnnnnnnnnnnnnnnnnnnnnnnnnnnnnnnnnnnnnnnnnnnnnnnnnnnnnnnnnnnnnnnnnnnnnnnnnnnnnnnnnnnnnnnnnnnnnnnnnnnnnnnnnnnnnnnnnnnnnnnnnnnnnnnnnnnnnnnnnnnnnnnnnnnnnnnnnnnnnnnnnnnnnnnnnnnnnnnnnnnnnnnnnnnnnnnnnnnnnnnnnnnnnnnnnnnnnnnnnnnnnnnnnnnnnnnnnnnnnnnnnnnnnnnnnnnnnnnnnnnnnnnnnnnnnnnnnnnnnnnnnnnnnnnnnnnnnnnnnnnnnnnnnnnnnnnnnnnnnnnnnnnnnnnnnnnnnnnnnnnnnnnnnnnnnnnnnnnnnnnnnnnnnnnnnnnnnnnnnnnnnnnnnnnnnnnnnnnnnnnnnnnnnnnnnnnnnnnnnnnnnnnnnnnnnnnnnnnnnnnnnnnnnnnnnnnnnnnnnnnnnnnnnnnnnnnnnnnnnnnnnnnnnnnnnnnnnnnnnnnnnnnnnnnnnnnnnnnnnnnnnnnnnnnnnnnnnnnnnnnnnnnnnnnnnnnnnnnnnnnnnnnnnnnnnnnnnnnnnnnnnnnnnnnnnnnnnnnnnnnnnnnnnnnnnnnnnnnnnnnnnnnnnnnnnnnnnnnnnnnnnnnnnnnnnnnnnnnnnnnnnnnnnnnnnnnnnnnnnnnnnnnnnnnnnnnnnnnnnnnnnnnnnnnnnnnnnnnnnnnnnnnnnnnnnnnnnnnnnnnnnnnnnnnnnnnnnnnnnnnnnnnnnnnnnnnnnnnnnnnnnnnnnnnnnnnnnnnnnnnnnnnnnnnnnnnnnnnnnnnnnnnnnnnnnnnnnnnnnnnnnnnnnnnnnnnnnnnnnnnnnnnnnnnnnnnnnnnnnnnnnnnnnnnnnnnnnnnnnnnnnnnnnnnnnnnnnnnnnnnnnnnnnnnnnnnnnnnnnnnnnnnnnnnnnnnnnnnnnnnnnnnnnnnnnnnnnnnnnnnnnnnnnnnnnnnnnnnnnnnnnnnnnnnnnnnnnnnnnnnnnnnnnnnnnnnnnnnnnnnnnnnnnnnnnnnnnnnnnnnnnnnnnnnnnnnnnnnnnnnnnnnnnnnnnnnnnnnnnnnnnnnnnnnnnnnnnnnnnnnnnnnnnnnnnnnnnnnnnnnnnnnnnnnnnnnnnnnnnnnnnnnnnnnnnnnnnnnnnnnnnnnnnnnnnnnnnnnnnnnnnnnnnnnnnnnnnnnnnnnnnnnnnnnnnnnnnnnnnnnnnnnnnnnnnnnnnnnnnnnnnnnnnnnnnnnnnnnnnnnnnnnnnnnnnnnnnnnnnnnnnnnnnnnnnnnnnnnnnnnnnnnnnnnnnnnnnnnnnnnnnnnnnnnnnnnnnnnnnnnnnnnnnnnnnnnnnnnnnnnnnnnnnnnnnnnnnnnnnnnnnnnnnnnnnnnnnnnnnnnnnnnnnnnnnnnnnnnnnnnnnnnnnnnnnnnnnnnnnnnnnnnnnnnnnnnnnnnnnnnnnnnnnnnnnnnnnnnnnnnnnnnnnnnnnnnnnnnnnnnnnnnnnnnnnnnnnnnnnnnnnnnnnnnnnnnnnnnnnnnnnnnnnnnnnnnnnnnnnnnnnnnnnnnnnnnnnnnnnnnnnnnnnnnnnnnnnnnnnnnnnnnnnnnnnnnnnnnnnnnnnnnnnnnnnnnnnnnnnnnnnnnnnnnnnnnnnnnnnnnnnnnnnnnnnnnnnnnnnnnnnnnnnnnnnnnnnnnnnnnnnnnnnnnnnnnnnnnnnnnnnnnnnnnnnnnnnnnnnnnnnnnnnnnnnnnnnnnnnnnnnnnnnnnnnnnnnnnnnnnnnnnnnnnnnnnnnnnnnnnnnnnnnnnnnnnnnnnnnnnnnnnnnnnnnnnnnnnnnnnnnnnnnnnnnnnnnnnnnnnnnnnnnnnnnnnnnnnnnnnnnnnnnnnnnnnnnnnnnnnnnnnnnnnnnnnnnnnnnnnnnnnnnnnnnnnnnnnnnnnnnnnnnnnnnnnnnnnnnnnnnnnnnnnnnnnnnnnnnnnnnnnnnnnnnnnnnnnnnnnnnnnnnnnnnnnnnnnnnnnnnnnnnnnnnnnnnnnnnnnnnnnnnnnnnnnnnnnnnnnnnnnnnnnnnnnnnnnnnnnnnnnnnnnnnnnnnnnnnnnnnnnnnnnnnnnnnnnnnnnnnnnnnnnnnnnnnnnnnnnnnnnnnnnnnnnnnnnnnnnnnnnnnnnnnnnnnnnnnnnnnnnnnnnnnnnnnnnnnnnnnnnnnnnnnnnnnnnnnnnnnnnnnnnnnnnnnnnnnnnnnnnnnnnnnnnnnnnnnnnnnnnnnnnnnnnnnnnnnnnnnnnnnnnnnnnnnnnnnnnnnnnnnnnnnnnnnnnnnnnnnnnnnnnnnnnnnnnnnnnnnnnnnnnnnnnnnnnnnnnnnnnnnnnnnnnnnnnnnnnnnnnnnnnnnnnnnnnnnnnnnnnnnnnnnnnnnnnnnnnnnnnnnnnnnnnnnnnnnnnnnnnnnnnnnnnnnnnnnnnnnnnnnnnnnnnnnnnnnnnnnnnnnnnnnnnnnnnnnnnnnnnnnnnnnnnnnnnnnnnnnnnnnnnnnnnnnnnnnnnnnnnnnnnnnnnnnnnnnnnnnnnnnnnnnnnnnnnnnnnnnnnnnnnnnnnnnnnnnnnnnnnnnnnnnnnnnnnnnnnnnnnnnnnnnnnnnnnnnnnnnnnnnnnnnnnnnnnnnnnnnnnnnnnnnnnnnnnnnnnnnnnnnnnnnnnnnnnnnnnnnnnnnnnnnnnnnnnnnnnnnnnnnnnnnnnnnnnnnnnnnnnnnnnnnnnnnnnnnnnnnnnnnnnnnnnnnnnnnnnnnnnnnnnnnnnnnnnnnnnnnnnnnnnnnnnnnnnnnnnnnnnnnnnnnnnnnnnnnnnnnnnnnnnnnnnnnnnnnnnnnnnnnnnnnnnnnnnnnnnnnnnnnnnnnnnnnnnnnnnnnnnnnnnnnnnnnnnnnnnnnnnnnnnnnnnnnnnnnnnnnnnnnnnnnnnnnnnnnnnnnnnnnnnnnnnnnnnnnnnnnnnnnnnnnnnnnnnnnnnnnnnnnnnnnnnnnnnnnnnnnnnnnnnnnnnnnnnnnnnnnnnnnnnnnnnnnnnnnnnnnnnnnnnnnnnnnnnnnnnnnnnnnnnnnnnnnnnnnnnnnnnnnnnnnnnnnnnnnnnnnnnnnnnnnnnnnnnnnnnnnnnnnnnnnnnnnnnnnnnnnnnnnnnnnnnnnnnnnnnnnnnnnnnnnnnnnnnnnnnnnnnnnnnnnnnnnnnnnnnnnnnnnnnnnnnnnnnnnnnnnnnnnnnnnnnnnnnnnnnnnnnnnnnnnnnnnnnnnnnnnnnnnnnnnnnnnnnnnnnnnnnnnnnnnnnnnnnnnnnnnnnnnnnnnnnnnnnnnnnnnnnnnnnnnnnnnnnnnnnnnnnnnnnnnnnnnnnnnnnnnnnnnnnnnnnnnnnnnnnnnnnnnnnnnnnnnnnnnnnnnnnnnnnnnnnnnnnnnnnnnnnnnnnnnnnnnnnnnnnnnnnnnnnnnnnnnnnnnnnnnnnnnnnnnnnnnnnnnnnnnnnnnnnnnnnnnnnnnnnnnnnnnnnnnnnnnnnnnnnnnnnnnnnnnnnnnnnnnnnnnnnnnnnnnnnnnnnnnnnnnnnnnnnnnnnnnnnnnnnnnnnnnnnnnnnnnnnnnnnnnnnnnnnnnnnnnnnnnnnnnnnnnnnnnnnnnnnnnnnnnnnnnnnnnnnnnnnnnnnnnnnnnnnnnnnnnnnnnnnnnnnnnnnnnnnnnnnnnnnnnnnnnnnnnnnnnnnnnnnnnnnnnnnnnnnnnnnnnnnnnnnnnnnnnnnnnnnnnnnnnnnnnnnnnnnnnnnnnnnnnnnnnnnnnnnnnnnnnnnnnnnnnnnnnnnnnnnnnnnnnnnnnnnnnnnnnnnnnnnnnnnnnnnnnnnnnnnnnnnnnnnnnnnnnnnnnnnnnnnnnnnnnnnnnnnnnnnnnnnnnnnnnnnnnnnnnnnnnnnnnnnnnnnnnnnnnnnnnnnnnnnnnnnnnnnnnnnnnnnnnnnnnnnnnnnnnnnnnnnnnnnnnnnnnnnnnnnnnnnnnnnnnnnnnnnnnnnnnnnnnnnnnnnnnnnnnnnnnnnnnnnnnnnnnnnnnnnnnnnnnnnnnnnnnnnnnnnnnnnnnnnnnnnnnnnnnnnnnnnnnnnnnnnnnnnnnnnnnnnnnnnnnnnnnnnnnnnnnnnnnnnnnnnnnnnnnnnnnnnnnnnnnnnnnnnnnnnnnnnnnnnnnnnnnnnnnnnnnnnnnnnnnnnnnnnnnnnnnnnnnnnnnnnnnnnnnnnnnnnnnnnnnnnnnnnnnnnnnnnnnnnnnnnnnnnnnnnnnnnnnnnnnnnnnnnnnnnnnnnnnnnnnnnnnnnnnnnnnnnnnnnnnnnnnnnnnnnnnnnnnnnnnnnnnnnnnnnnnnnnnnnnnnnnnnnnnnnnnnnnnnnnnnnnnnnnnnnnnnnnnnnnnnnnnnnnnnnnnnnnnnnnnnnnnnnnnnnnnnnnnnnnnnnnnnnnnnnnnnnnnnnnnnnnnnnnnnnnnnnnnnnnnnnnnnnnnnnnnnnnnnnnnnnnnnnnnnnnnnnnnnnnnnnnnnnnnnnnnnnnnnnnnnnnnnnnnnnnnnnnnnnnnnnnnnnnnnnnnnnnnnnnnnnnnnnnnnnnnnnnnnnnnnnnnnnnnnnnnnnnnnnnnnnnnnnnnnnnnnnnnnnnnnnnnnnnnnnnnnnnnnnnnnnnnnnnnnnnnnnnnnnnnnnnnnnnnnnnnnnnnnnnnnnnnnnnnnnnnnnnnnnnnnnnnnnnnnnnnnnnnnnnnnnnnnnnnnnnnnnnnnnnnnnnnnnnnnnnnnnnnnnnnnnnnnnnnnnnnnnnnnnnnnnnnnnnnnnnnnnnnnnnnnnnnnnnnnnnnnnnnnnnnnnnnnnnnnnnnnnnnnnnnnnnnnnnnnnnnnnnnnnnnnnnnnnnnnnnnnnnnnnnnnnnnnnnnnnnnnnnnnnnnnnnnnnnnnnnnnnnnnnnnnnnnnnnnnnnnnnnnnnnnnnnnnnnnnnnnnnnnnnnnnnnnnnnnnnnnnnnnnnnnnnnnnnnnnnnnnnnnnnnnnnnnnnnnnnnnnnnnnnnnnnnnnnnnnnnnnnnnnnnnnnnnnnnnnnnnnnnnnnnnnnnnnnnnnnnnnnnnnnnnnnnnnnnnnnnnnnnnnnnnnnnnnnnnnnnnnnnnnnnnnnnnnnnnnnnnnnnnnnnnnnnnnnnnnnnnnnnnnnnnnnnnnnnnnnnnnnnnnnnnnnnnnnnnnnnnnnnnnnnnnnnnnnnnnnnnnnnnnnnnnnnnnnnnnnnnnnnnnnnnnnnnnnnnnnnnnnnnnnnnnnnnnnnnnnnnnnnnnnnnnnnnnnnnnnnnnnnnnnnnnnnnnnnnnnnnnnnnnnnnnnnnnnnnnnnnnnnnnnnnnnnnnnnnnnnnnnnnnnnnnnnnnnnnnnnnnnnnnnnnnnnnnnnnnnnnnnnnnnnnnnnnnnnnnnnnnnnnnnnnnnnnnnnnnnnnnnnnnnnnnnnnnnnnnnnnnnnnnnnnnnnnnnnnnnnnnnnnnnnnnnnnnnnnnnnnnnnnnnnnnnnnnnnnnnnnnnnnnnnnnnnnnnnnnnnnnnnnnnnnnnnnnnnnnnnnnnnnnnnnnnnnnnnnnnnnnnnnnnnnnnnnnnnnnnnnnnnnnnnnnnnnnnnnnnnnnnnnnnnnnnnnnnnnnnnnnnnnnnnnnnnnnnnnnnnnnnnnnnnnnnnnnnnnnnnnnnnnnnnnnnnnnnnnnnnnnnnnnnnnnnnnnnnnnnnnnnnnnnnnnnnnnnnnnnnnnnnnnnnnnnnnnnnnnnnnnnnnnnnnnnnnnnnnnnnnnnnnnnnnnnnnnnnnnnnnnnnnnnnnnnnnnnnnnnnnnnnnnnnnnnnnnnnnnnnnnnnnnnnnnnnnnnnnnnnnnnnnnnnnnnnnnnnnnnnnnnnnnnnnnnnnnnnnnnnnnnnnnnnnnnnnnnnnnnnnnnnnnnnnnnnnnnnnnnnnnnnnnnnnnnnnnnnnnnnnnnnnnnnnnnnnnnnnnnnnnnnnnnnnnnnnnnnnnnnnnnnnnnnnnnnnnnnnnnnnnnnnnnnnnnnnnnnnnnnnnnnnnnnnnnnnnnnnnnnnnnnnnnnnnnnnnnnnnnnnnnnnnnnnnnnnnnnnnnnnnnnnnnnnnnnnnnnnnnnnnnnnnnnnnnnnnnnnnnnnnnnnnnnnnnnnnnnnnnnnnnnnnnnnnnnnnnnnnnnnnnnnnnnnnnnnnnnnnnnnnnnnnnnnnnnnnnnnnnnnnnnnnnnnnnnnnnnnnnnnnnnnnnnnnnnnnnnnnnnnnnnnnnnnnnnnnnnnnnnnnnnnnnnnnnnnnnnnnnnnnnnnnnnnnnnnnnnnnnnnnnnnnnnnnnnnnnnnnnnnnnnnnnnnnnnnnnnnnnnnnnnnnnnnnnnnnnnnnnnnnnnnnnnnnnnnnnnnnnnnnnnnnnnnnnnnnnnnnnnnnnnnnnnnnnnnnnnnnnnnnnnnnnnnnnnnnnnnnnnnnnnnnnnnnnnnnnnnnnnnnnnnnnnnnnnnnnnnnnnnnnnnnnnnnnnnnnnnnnnnnnnnnnnnnnnnnnnnnnnnnnnnnnnnnnnnnnnnnnnnnnnnnnnnnnnnnnnnnnnnnnnnnnnnnnnnnnnnnnnnnnnnnnnnnnnnnnnnnnnnnnnnnnnnnnnnnnnnnnnnnnnnnnnnnnnnnnnnnnnnnnnnnnnnnnnnnnnnnnnnnnnnnnnnnnnnnnnnnnnnnnnnnnnnnnnnnnnnnnnnnnnnnnnnnnnnnnnnnnnnnnnnnnnnnnnnnnnnnnnnnnnnnnnnnnnnnnnnnnnnnnnnnnnnnnnnnnnnnnnnnnnnnnnnnnnnnnnnnnnnnnnnnnnnnnnnnnnnnnnnnnnnnnnnnnnnnnnnnnnnnnnnnnnnnnnnnnnnnnnnnnnnnnnnnnnnnnnnnnnnnnnnnnnnnnnnnnnnnnnnnnnnnnnnnnnnnnnnnnnnnnnnnnnnnnnnnnnnnnnnnnnnnnnnnnnnnnnnnnnnnnnnnnnnnnnnnnnnnnnnnnnnnnnnnnnnnnnnnnnnnnnnnnnnnnnnnnnnnnnnnnnnnnnnnnnnnnnnnnnnnnnnnnnnnnnnnnnnnnnnnnnnnnnnnnnnnnnnnnnnnnnnnnnnnnnnnnnnnnnnnnnnnnnnnnnnnnnnnnnnnnnnnnnnnnnnnnnnnnnnnnnnnnnnnnnnnnnnnnnnnnnnnnnnnnnnnnnnnnnnnnnnnnnnnnnnnnnnnnnnnnnnnnnnnnnnnnnnnnnnnnnnnnnnnnnnnnnnnnnnnnnnnnnnnnnnnnnnnnnnnnnnnnnnnnnnnnnnnnnnnnnnnnnnnnnnnnnnnnnnnnnnnnnnnnnnnnnnnnnnnnnnnnnnnnnnnnnnnnnnnnnnnnnnnnnnnnnnnnnnnnnnnnnnnnnnnnnnnnnnnnnnnnnnnnnnnnnnnnnnnnnnnnnnnnnnnnnnnnnnnnnnnnnnnnnnnnnnnnnnnnnnnnnnnnnnnnnnnnnnnnnnnnnnnnnnnnnnnnnnnnnnnnnnnnnnnnnnnnnnnnnnnnnnnnnnnnnnnnnnnnnnnnnnnnnnnnnnnnnnnnnnnnnnnnnnnnnnnnnnnnnnnnnnnnnnnnnnnnnnnnnnnnnnnnnnnnnnnnnnnnnnnnnnnnnnnnnnnnnnnnnnnnnnnnnnnnnnnnnnnnnnnnnnnnnnnnnnnnnnnnnnnnnnnnnnnnnnnnnnnnnnnnnnnnnnnnnnnnnnnnnnnnnnnnnnnnnnnnnnnnnnnnnnnnnnnnnnnnnnnnnnnnnnnnnnnnnnnnnnnnnnnnnnnnnnnnnnnnnnnnnnnnnnnnnnnnnnnnnnnnnnnnnnnnnnnnnnnnnnnnnnnnnnnnnnnnnnnnnnnnnnnnnnnnnnnnnnnnnnnnnnnnnnnnnnnnnnnnnnnnnnnnnnnnnnnnnnnnnnnnnnnnnnnnnnnnnnnnnnnnnnnnnnnnnnnnnnnnnnnnnnnnnnnnnnnnnnnnnnnnnnnnnnnnnnnnnnnnnnnnnnnnnnnnnnnnnnnnnnnnnnnnnnnnnnnnnnnnnnnnnnnnnnnnnnnnnnnnnnnnnnnnnnnnnnnnnnnnnnnnnnnnnnnnnnnnnnnnnnnnnnnnnnnnnnnnnnnnnnnnnnnnnnnnnnnnnnnnnnnnnnnnnnnnnnnnnnnnnnnnnnnnnnnnnnnnnnnnnnnnnnnnnnnnnnnnnnnnnnnnnnnnnnnnnnnnnnnnnnnnnnnnnnnnnnnnnnnnnnnnnnnnnnnnnnnnnnnnnnnnnnnnnnnnnnnnnnnnnnnnnnnnnnnnnnnnnnnnnnnnnnnnnnnnnnnnnnnnnnnnnnnnnnnnnnnnnnnnnnnnnnnnnnnnnnnnnnnnnnnnnnnnnnnnnnnnnnnnnnnnnnnnnnnnnnnnnnnnnnnnnnnnnnnnnnnnnnnnnnnnnnnnnnnnnnnnnnnnnnnnnnnnnnnnnnnnnnnnnnnnnnnnnnnnnnnnnnnnnnnnnnnnnnnnnnnnnnnnnnnnnnnnnnnnnnnnnnnnnnnnnnnnnnnnnnnnnnnnnnnnnnnnnnnnnnnnnnnnnnnnnnnnnnnnnnnnnnnnnnnnnnnnnnnnnnnnnnnnnnnnnnnnnnnnnnnnnnnnnnnnnnnnnnnnnnnnnnnnnnnnnnnnnnnnnnnnnnnnnnnnnnnnnnnnnnnnnnnnnnnnnnnnnnnnnnnnnnnnnnnnnnnnnnnnnnnnnnnnnnnnnnnnnnnnnnnnnnnnnnnnnnnnnnnnnnnnnnnnnnnnnnnnnnnnnnnnnnnnnnnnnnnnnnnnnnnnnnnnnnnnnnnnnnnnnnnnnnnnnnnnnnnnnnnnnnnnnnnnnnnnnnnnnnnnnnnnnnnnnnnnnnnnnnnnnnnnnnnnnnnnnnnnnnnnnnnnnnnnnnnnnnnnnnnnnnnnnnnnnnnnnnnnnnnnnnnnnnnnnnnnnnnnnnnnnnnnnnnnnnnnnnnnnnnnnnnnnnnnnnnnnnnnnnnnnnnnnnnnnnnnnnnnnnnnnnnnnnnnnnnnnnnnnnnnnnnnnnnnnnnnnnnnnnnnnnnnnnnnnnnnnnnnnnnnnnnnnnnnnnnnnnnnnnnnnnnnnnnnnnnnnnnnnnnnnnnnnnnnnnnnnnnnnnnnnnnnnnnnnnnnnnnnnnnnnnnnnnnnnnnnnnnnnnnnnnnnnnnnnnnnnnnnnnnnnnnnnnnnnnnnnnnnnnnnnnnnnnnnnnnnnnnnnnnnnnnnnnnnnnnnnnnnnnnnnnnnnnnnnnnnnnnnnnnnnnnnnnnnnnnnnnnnnnnnnnnnnnnnnnnnnnnnnnnnnnnnnnnnnnnnnnnnnnnnnnnnnnnnnnnnnnnnnnnnnnnnnnnnnnnnnnnnnnnnnnnnnnnnnnnnnnnnnnnnnnnnnnnnnnnnnnnnnnnnnnnnnnnnnnnnnnnnnnnnnnnnnnnnnnnnnnnnnnnnnnnnnnnnnnnnnnnnnnnnnnnnnnnnnnnnnnnnnnnnnnnnnnnnnnnnnnnnnnnnnnnnnnnnnnnnnnnnnnnnnnnnnnnnnnnnnnnnnnnnnnnnnnnnnnnnnnnnnnnnnnnnnnnnnnnnnnnnnnnnnnnnnnnnnnnnnnnnnnnnnnnnnnnnnnnnnnnnnnnnnnnnnnnnnnnnnnnnnnnnnnnnnnnnnnnnnnnnnnnnnnnnnnnnnnnnnnnnnnnnnnnnnnnnnnnnnnnnnnnnnnnnnnnnnnnnnnnnnnnnnnnnnnnnnnnnnnnnnnnnnnnnnnnnnnnnnnnnnnnnnnnnnnnnnnnnnnnnnnnnnnnnnnnnnnnnnnnnnnnnnnnnnnnnnnnnnnnnnnnnnnnnnnnnnnnnnnnnnnnnnnnnnnnnnnnnnnnnnnnnnnnnnnnnnnnnnnnnnnnnnnnnnnnnnnnnnnnnnnnnnnnnnnnnnnnnnnnnnnnnnnnnnnnnnnnnnnnnnnnnnnnnnnnnnnnnnnnnnnnnnnnnnnnnnnnnnnnnnnnnnnnnnnnnnnnnnnnnnnnnnnnnnnnnnnnnnnnnnnnnnnnnnnnnnnnnnnnnnnnnnnnnnnnnnnnnnnnnnnnnnnnnnnnnnnnnnnnnnnnnnnnnnnnnnnnnnnnnnnnnnnnnnnnnnnnnnnnnnnnnnnnnnnnnnnnnnnnnnnnnnnnnnnnnnnnnnnnnnnnnnnnnnnnnnnnnnnnnnnnnnnnnnnnnnnnnnnnnnnnnnnnnnnnnnnnnnnnnnnnnnnnnnnnnnnnnnnnnnnnnnnnnnnnnnnnnnnnnnnnnnnnnnnnnnnnnnnnnnnnnnnnnnnnnnnnnnnnnnnnnnnnnnnnnnnnnnnnnnnnnnnnnnnnnnnnnnnnnnnnnnnnnnnnnnnnnnnnnnnnnnnnnnnnnnnnnnnnnnnnnnnnnnnnnnnnnnnnnnnnnnnnnnnnnnnnnnnnnnnnnnnnnnnnnnnnnnnnnnnnnnnnnnnnnnnnnnnnnnnnnnnnnnnnnnnnnnnnnnnnnnnnnnnnnnnnnnnnnnnnnnnnnnnnnnnnnnnnnnnnnnnnnnnnnnnnnnnnnnnnnnnnnnnnnnnnnnnnnnnnnnnnnnnnnnnnnnnnnnnnnnnnnnnnnnnnnnnnnnnnnnnnnnnnnnnnnnnnnnnnnnnnnnnnnnnnnnnnnnnnnnnnnnnnnnnnnnnnnnnnnnnnnnnnnnnnnnnnnnnnnnnnnnnnnnnnnnnnnnnnnnnnnnnnnnnnnnnnnnnnnnnnnnnnnnnnnnnnnnnnnnnnnnnnnnnnnnnnnnnnnnnnnnnnnnnnnnnnnnnnnnnnnnnnnnnnnnnnnnnnnnnnnnnnnnnnnnnnnnnnnnnnnnnnnnnnnnnnnnnnnnnnnnnnnnnnnnnnnnnnnnnnnnnnnnnnnnnnnnnnnnnnnnnnnnnnnnnnnnnnnnnnnnnnnnnnnnnnnnnnnnnnnnnnnnnnnnnnnnnnnnnnnnnnnnnnnnnnnnnnnnnnnnnnnnnnnnnnnnnnnnnnnnnnnnnnnnnnnnnnnnnnnnnnnnnnnnnnnnnnnnnnnnnnnnnnnnnnnnnnnnnnnnnnnnnnnnnnnnnnnnnnnnnnnnnnnnnnnnnnnnnnnnnnnnnnnnnnnnnnnnnnnnnnnnnnnnnnnnnnnnnnnnnnnnnnnnnnnnnnnnnnnnnnnnnnnnnnnnnnnnnnnnnnnnnnnnnnnnnnnnnnnnnnnnnnnnnnnnnnnnnnnnnnnnnnnnnnnnnnnnnnnnnnnnnnnnnnnnnnnnnnnnnnnnnnnnnnnnnnnnnnnnnnnnnnnnnnnnnnnnnnnnnnnnnnnnnnnnnnnnnnnnnnnnnnnnnnnnnnnnnnnnnnnnnnnnnnnnnnnnnnnnnnnnnnnnnnnnnnnnnnnnnnnnnnnnnnnnnnnnnnnnnnnnnnnnnnnnnnnnnnnnnnnnnnnnnnnnnnnnnnnnnnnnnnnnnnnnnnnnnnnnnnnnnnnnnnnnnnnnnnnnnnnnnnnnnnnnnnnnnnnnnnnnnnnnnnnnnnnnnnnnnnnnnnnnnnnnnnnnnnnnnnnnnnnnnnnnnnnnnnnnnnnnnnnnnnnnnnnnnnnnnnnnnnnnnnnnnnnnnnnnnnnnnnnnnnnnnnnnnnnnnnnnnnnnnnnnnnnnnnnnnnnnnnnnnnnnnnnnnnnnnnnnnnnnnnnnnnnnnnnnnnnnnnnnnnnnnnnnnnnnnnnnnnnnnnnnnnnnnnnnnnnnnnnnnnnnnnnnnnnnnnnnnnnnnnnnnnnnnnnnnnnnnnnnnnnnnnnnnnnnnnnnnnnnnnnnnnnnnnnnnnnnnnnnnnnnnnnnnnnnnnnnnnnnnnnnnnnnnnnnnnnnnnnnnnnnnnnnnnnnnnnnnnnnnnnnnnnnnnnnnnnnnnnnnnnnnnnnnnnnnnnnnnnnnnnnnnnnnnnnnnnnnnnnnnnnnnnnnnnnnnnnnnnnnnnnnnnnnnnnnnnnnnnnnnnnnnnnnnnnnnnnnnnnnnnnnnnnnnnnnnnnnnnnnnnnnnnnnnnnnnnnnnnnnnnnnnnnnnnnnnnnnnnnnnnnnnnnnnnnnnnnnnnnnnnnnnnnnnnnnnnnnnnnnnnnnnnnnnnnnnnnnnnnnnnnnnnnnnnnnnnnnnnnnnnnnnnnnnnnnnnnnnnnnnnnnnnnnnnnnnnnnnnnnnnnnnnnnnnnnnnnnnnnnnnnnnnnnnnnnnnnnnnnnnnnnnnnnnnnnnnnnnnnnnnnnnnnnnnnnnnnnnnnnnnnnnnnnnnnnnnnnnnnnnnnnnnnnnnnnnnnnnnnnnnnnnnnnnnnnnnnnnnnnnnnnnnnnnnnnnnnnnnnnnnnnnnnnnnnnnnnnnnnnnnnnnnnnnnnnnnnnnnnnnnnnnnnnnnnnnnnnnnnnnnnnnnnnnnnnnnnnnnnnnnnnnnnnnnnnnnnnnnnnnnnnnnnnnnnnnnnnnnnnnnnnnnnnnnnnnnnnnnnnnnnnnnnnnnnnnnnnnnnnnnnnnnnnnnnnnnnnnnnnnnnnnnnnnnnnnnnnnnnnnnnnnnnnnnnnnnnnnnnnnnnnnnnnnnnnnnnnnnnnnnnnnnnnnnnnnnnnnnnnnnnnnnnnnnnnnnnnnnnnnnnnnnnnnnnnnnnnnnnnnnnnnnnnnnnnnnnnnnnnnnnnnnnnnnnnnnnnnnnnnnnnnnnnnnnnnnnnnnnnnnnnnnnnnnnnnnnnnnnnnnnnnnnnnnnnnnnnnnnnnnnnnnnnnnnnnnnnnnnnnnnnnnnnnnnnnnnnnnnnnnnnnnnnnnnnnnnnnnnnnnnnnnnnnnnnnnnnnnnnnnnnnnnnnnnnnnnnnnnnnnnnnnnnnnnnnnnnnnnnnnnnnnnnnnnnnnnnnnnnnnnnnnnnnnnnnnnnnnnnnnnnnnnnnnnnnnnnnnnnnnnnnnnnnnnnnnnnnnnnnnnnnnnnnnnnnnnnnnnnnnnnnnnnnnnnnnnnnnnnnnnnnnnnnnnnnnnnnnnnnnnnnnnnnnnnnnnnnnnnnnnnnnnnnnnnnnnnnnnnnnnnnnnnnnnnnnnnnnnnnnnnnnnnnnnnnnnnnnnnnnnnnnnnnnnnnnnnnnnnnnnnnnnnnnnnnnnnnnnnnnnnnnnnnnnnnnnnnnnnnnnnnnnnnnnnnnnnnnnnnnnnnnnnnnnnnnnnnnnnnnnnnnnnnnnnnnnnnnnnnnnnnnnnnnnnnnnnnnnnnnnnnnnnnnnnnnnnnnnnnnnnnnnnnnnnnnnnnnnnnnnnnnnnnnnnnnnnnnnnnnnnnnnnnnnnnnnnnnnnnnnnnnnnnnnnnnnnnnnnnnnnnnnnnnnnnnnnnnnnnnnnnnnnnnnnnnnnnnnnnnnnnnnnnnnnnnnnnnnnnnnnnnnnnnnnnnnnnnnnnnnnnnnnnnnnnnnnnnnnnnnnnnnnnnnnnnnnnnnnnnnnnnnnnnnnnnnnnnnnnnnnnnnnnnnnnnnnnnnnnnnnnnnnnnnnnnnnnnnnnnnnnnnnnnnnnnnnnnnnnnnnnnnnnnnnnnnnnnnnnnnnnnnnnnnnnnnnnnnnnnnnnnnnnnnnnnnnnnnnnnnnnnnnnnnnnnnnnnnnnnnnnnnnnnnnnnnnnnnnnnnnnnnnnnnnnnnnnnnnnnnnnnnnnnnnnnnnnnnnnnnnnnnnnnnnnnnnnnnnnnnnnnnnnnnnnnnnnnnnnnnnnnnnnnnnnnnnnnnnnnnnnnnnnnnnnnnnnnnnnnnnnnnnnnnnnnnnnnnnnnnnnnnnnnnnnnnnnnnnnnnnnnnnnnnnnnnnnnnnnnnnnnnnnnnnnnnnnnnnnnnnnnnnnnnnnnnnnnnnnnnnnnnnnnnnnnnnnnnnnnnnnnnnnnnnnnnnnnnnnnnnnnnnnnnnnnnnnnnnnnnnnnnnnnnnnnnnnnnnnnnnnnnnnnnnnnnnnnnnnnnnnnnnnnnnnnnnnnnnnnnnnnnnnnnnnnnnnnnnnnnnnnnnnnnnnnnnnnnnnnnnnnnnnnnnnnnnnnnnnnnnnnnnnnnnnnnnnnnnnnnnnnnnnnnnnnnnnnnnnnnnnnnnnnnnnnnnnnnnnnnnnnnnnnnnnnnnnnnnnnnnnnnnnnnnnnnnnnnnnnnnnnnnnnnnnnnnnnnnnnnnnnnnnnnnnnnnnnnnnnnnnnnnnnnnnnnnnnnnnnnnnnnnnnnnnnnnnnnnnnnnnnnnnnnnnnnnnnnnnnnnnnnnnnnnnnnnnnnnnnnnnnnnnnnnnnnnnnnnnnnnnnnnnnnnnnnnnnnnnnnnnnnnnnnnnnnnnnnnnnnnnnnnnnnnnnnnnnnnnnnnnnnnnnnnnnnnnnnnnnnnnnnnnnnnnnnnnnnnnnnnnnnnnnnnnnnnnnnnnnnnnnnnnnnnnnnnnnnnnnnnnnnnnnnnnnnnnnnnnnnnnnnnnnnnnnnnnnnnnnnnnnnnnnnnnnnnnnnnnnnnnnnnnnnnnnnnnnnnnnnnnnnnnnnnnnnnnnnnnnnnnnnnnnnnnnnnnnnnnnnnnnnnnnnnnnnnnnnnnnnnnnnnnnnnnnnnnnnnnnnnnnnnnnnnnnnnnnnnnnnnnnnnnnnnnnnnnnnnnnnnnnnnnnnnnnnnnnnnnnnnnnnnnnnnnnnnnnnnnnnnnnnnnnnnnnnnnnnnnnnnnnnnnnnnnnnnnnnnnnnnnnnnnnnnnnnnnnnnnnnnnnnnnnnnnnnnnnnnnnnnnnnnnnnnnnnnnnnnnnnnnnnnnnnnnnnnnnnnnnnnnnnnnnnnnnnnnnnnnnnnnnnnnnnnnnnnnnnnnnnnnnnnnnnnnnnnnnnnnnnnnnnnnnnnnnnnnnnnnnnnnnnnnnnnnnnnnnnnnnnnnnnnnnnnnnnnnnnnnnnnnnnnnnnnnnnnnnnnnnnnnnnnnnnnccgccgccagcccgctccccggcgacaccccgctttgctttcatccccgaaaccttcagccccgatccggcccgaccaccgccgccagcccgctccccggtgacaacccgcgccgcgatctcatccatcgggccgcgaagcgcccgccctttttactttcgtttccgaaacctaacggccccgatccggcccgcgccgccagaaggctcccgcgcccggcctgacgctccacaaaaaaaaggacggcccccgccgccacaacacaaaaaaaatattttcttccaaacccatcgaatactttcacccgcgcaaccaaattccccgacttccgaaagtccacaacccccaaatgaaagtattcggaaccgaagttatgacagaaccttacgttttttcagaccccccggtacatggtatcagcgaaatttatgaagccgtatttcttatcgccgaatccgggataaatcgtcgcgctaagacgttcctcgcatcttcagtcgtgtccgtgaaaaaaaaatgggggattagaacttgtaccctatgccgtcatactttgttccgtccgcggcaatgcaaggcgaacagcacccgctctgcccgtccccagcagcctcaaacagttcctcgcagtacggaccgcacgggcacggctcgtcaagatcatcgccttcgatatcaaaaatgcccgagccttccgcaacttgcatacttgtggccgtattatatccgctggtgttgacgattatgagtacggatcttttgtatccgagagcgacggagcatacgacgccgacgggtttatcaagaggattcagattggagagcaaagcgtagttccagccgggtttgtagttgccggagtaatcaggtccggaaactcctgaatattcgggggaacaaagctcgaacctctgttccgcagcgttgtcgtcccgaataaatgtcccctgaaaactgaatcctttttggcccagacattcgctgtcggacctgtcgcacaccgaagcgcaaagcccggaaggcgtgaaatccgccgagtacggatgcgacggcatcaccgtctgggcgacggccgtgtgcgaacaatccgcgtccgtcggaaaaaccttcattgccgtttcgttgatgtcgtccgtccttccgcactcagtcaaatcgacgatgggaaggaattccatcagggaagcgttgtccgtgccgatcaaggatctcacgggaaatcccttgcacgagttggcggcatcgttgatagccgtcttaagaacaagagtcgctcttatggcgtttctcactctcgttgacgcctgatactggtaatacgaaggcgtcatggcgcccatcaatatcagcattatgcacaaaacaacaagaatttccgccaaggtgaatcctttttcccggcgtcgcttgtttcgcattttttctccctgaatattattctgtttcaggcgcgcaataaaaaagcgcttcggctaactatggtattccccatttcgactggagtcaaacaatttgcccgtccgagaacgcgtgcgaatttgcctcataatgtatctatatcaataaaagtatacacccgcgcccaaaacactgtcaaacacagttcatttcagcggtttcgagttcaaagagcaaatgaaaacagaactaaaggctaaagattgagaatccgcgcaatccgctttcacgctgctggaccgcatttatcaccaatccgcgctggaactattctatgatatcaacccggcgggggactttatagggagcaagcgcagagcggagaaatttcctcagttcagccggttcagctgaggctccggagcgaagtttcgcttccgccataactctctctccgagggaatcgtccgggacgccgaagacgcggcagctttccaccgccggatgcgcgccgagcagcgcttccacctcctgcggatagacgttgaacccgccgacaagcacaagccttttcttatggccggttatgtatatatatccgtcttcgtctatgcgggctaggtcgccggagaacaaccaaccgtccttaagaaacatcgccgtgtcttcgggtttttcgagatattcgcgcatgacgttgccgccccggacgcaaagctcgcccgtatcgcccgtcgggagcgcctcgccgttctcatcgacgactttcacagttatgccttcaatcggcgggcctactgagccggctttcacaaactccctgccccgcatcgggttcaccgaagtcaccggcccgcattcagttatcccgtacccctgatatacatttgcgttgagtctctccacaagcccttcgtatagatcgtctgtcagaggagcgcctccgggaactatcgccctcacgaacgataggtcgctccccgccgagccgaatttatcaagcagccttttgtttatcgtcggcacgttcggaaaaacgcttatcttctcttttttaaggtccgccatcacgcgatcctctgaaaacatctcatgcagaacggtcttggcgcccgcgagaaaaggcagatgcagacatgtggtgcaggcgaacgcgtggaacaggggaatgacggtgagaaaagcgtcgtcttcatgcgccgccgccgtcgcgacgctcgaacgggcgttggtcatcagtcctagatgagttaggcaggctccgaggggatatcccctccatgcgttggtgtagatgatagcagccgtgtggttcggatctaggtccgcgggcgccggcgcggggaccgcctctgatatcgccttcttcatgtcgcgcttggccgggtcgcccatagaatcgctgtaaagcaacttcgttccggcgttcgcggcggcctccctgacgggcggctcgaacatcggatgcattatcgccagtttcgccgcgctatctttcagcatatattcaatctcgcgggcggaatacagcgggttgatagtgacgacctccaccccggccgcgaaggccccgtaaagagccacagggtattccggaacgttcggaatcgctatcgccatcctgtccccgcgcgacatgcccatctcgccgagcgcgcccgcaaacctcagcgcgtccgcgtaaagctgctcgtaccttatcactctgtcgtaaaaaacgaccgcgggccggtcgggaaaccgctccgcgctattttttagattgtccgcaaggttcataaaatcttattcctgttttccgggcgcgcgcgcacaccgcgccgcaaagcgccctttatacagtttccttattatgtgggtggaaattgcctctatcgaaaaaaaacgagggtcaagctcgcgatgcgaggtctttcaatagccagtcgacggcctctgacaggtcttctgcaatgaagtcgggttcgacgccttcgcgctccctgttgaactcccagtcgcctctgccgtatcccgtcaggacgagtatgcctgcggcgcagcccgcgcgcttcgccagcgccacatcgctgagcttgtcgccaatcatgtacgaacgggcaacgtccagtcccatttccgccgccgccctgtcaatcagtcccgtcttaggtttcctgcagtcgcagtccatcctgtaaggcggctctccggcggtcggatgatggggacaatagtaaatcccgtccagctttgcgccgcccacggccagcagctcgttcatgcgcgcgtggacatccgctatgagtctttcagggaaatagccgcgcgcgacgcccgcctgattggtgaccagaacagcgggcgctcctgcttcgttcagcttttttatcgccgaagccgacttttcgagcagcttgaaccggctgacatggttcacatagccgatctcctcgctcagagtgccgtccctgtctatgaaaacagcgggtattccgctcatcgcgcgcctcccggcagccgccgcgttttcaccgcgacctgtcgttttcctctataatatctttcatcctgaacacgagatcgagcgccttgcgcggagtcagctcttcggggtccgccgcgcggagcatttcctcgatgcggctcggaggctggtcgggaataagcgcgagttgcgccgtccgggcttcagggacttcgatgtccgactccgcttcctgagaaaccagaatttccgacgcgcggcgtatgaccgaggcgggtatgcccgccagtcttgccacctcgactccgaaactcctatccgtgccgccggggcgcaccttgtgcgtgaacagaatctccctgccccgctcaactgcggaaacgtggaagttctctatcctctcgaacaggtcggccatgcgcgtcagatggttgaaatgtgttgcgaatagagttctcgcgccaatcctctcgtgtatgtattcggagacggcccatgcgatgctaatgccgtctgcggcgctcgtgcctctgccgacctcgtcgagcagcacgaggcttttctttgtcgcgttagtcagaatcgtcgccgtctctaccatctccaccatgaacgtgctgaggccaagggtgatatcgtcgacagctccgaccctagtgaatatcctgtccaccacgcctatctccgccgcgcggcacggcacgaagctgcccatctgcgccatcagcgttatcagcgccacctgcctcatgtaagtcgattttcccgacatgttcggcccggtgatgatatgtatctggctcttcgagcaattgagcagggtgtcgttggggatgaatgtgcgcgcgggcatcgtcaggtccagcgacgggtgccggccttcttctatctttatcgtttccgacgcgctgacctgcgggcggcagtacctgttttcctccgccgcctgcgccagcgactgcaacgcgtccagcgccgccaccgcccgcgacgtcttcagcatccttccgatgtgccccgccagattgtcccttatcccgcagaacaactgatattcaagctcttcgagcctgctttccgctccgagtatcgcgaactctttttctttcagttcctctgtgtagaaccgctccgcgttggatgtggtctgtttgcgtatgtatctatcagggacgtttgccagattggccttcgtcacttcgatataataaccgaacactttgttgtagccgattttgagggatttgacgcctgtttcccttcgttctttttcttcgaggtcggcaatccatttccgtccgccttttttcagcgcgcgcagttcgtccacgcgggcatcgaagccgtcgcggatgatgccgccctcgcgggcggacctcggagcgtcgtcagaaacggcggcggcaaggtcggctcgcgcgtcttccagcgtgtccatgtcggcgcgcagggactccagcatgtcgcacttgaaagcggaggcgagggccgcgagcgcgggcagcgccgctagtgagtcgcgcactgccagcgtctccttgggcgtgattagcatggtggcgacccggctgcaaagcctctcgatatcccttacctcggaaaggctttcccttgcgccctcccgcgccgtcctgttttccagaagctcgccgacggcgtccagcctcaggtttatctccgccgggtcgttgagaggctgttcgagccagttgcgtatcagcctctttcccatcggcgtgagagtcctgtcaagcgcccacagaaggctccccttcttttccttctcgcgcatggtttccgtcagttcgaggttgcgccgcgtcgccgcgtccagatacatcccgtcgcggggccggtagagcgaaacggacatcacgtgcttggggtcggcgcgcaggttgtccctgacatagtccagaagctgcccggcggccattatcgcagcggggaactcctctatgccgaatccgagcagcgtcttcactccgaaatgcgcgcacagcctgtcccggtggtacggcgcgtcgaacatcaggtcaagctcggtgactttcacgtcgggaaaacgggccgatattctaccggcggcgtccgccccggaatcgcgcatcgccacgacgcattcgccgggcgacagccgctcgatctccctgaccagagacgaatcgtccgccgacctcgatatctcgcccgccttgaactccccggtcgaaacgtcgagtatccccagcccgaacctgtcgccggcgtccgccaccgaaagtatgtagttgtttcgcgatgagtccagcctgtccagatcgagatacgttccgggggtgacaaccctgacgacttcccggttgacgagtttaccggcgaccgcgtcctctgtctggtccgcgatggcgaccttgtgtccgcgctggatgagttttgccacgtaaccgtcggcggcgtgatggggcacgccgcacatgggcagtttgacgcccttgccgaactcgcgcgcggtcagcactatttccagttcggcggcggcggttttcgcgtcctcgccgaacatctcgtagaaatcgcccagccggtacatcaaaatggcgtccctgtggcgctccttgatggcggcgtactgctgatacataggagtggcgttcatacggcctctcccttcagggcgtgcggagacgctcccgtgatgcgggcaagcaactcatctcccggctcggccttaacgccttcgcgcacagtgaaatccactatcctgttctcccgcgtccgcccccgccgccgctctccgcccagagactcgaagaccatcgtttccgcgattccgcctacaaggctttcgttgatttccctcgatatattctcctgcaaatccaacagccgcgcaagccgcgacttcttggcgtcgagcggcgcgtcgtcggcctgcccggcggcggcggtccccggacgcggcgaatatttgaacgcgtacaactgatccacccgcgcgcgcgacgccagctcaagcgtccgctcgaattgctcttccgtctctccgggataccctactatcgcgtccgccgatatgccgcagcccggcgagtagtttcttatcatttctattgtttcgagataatacgccgcgtcgtatccgcgcctcatcctcctgagaatctcgtcgtcgccgctttggaacggcgcgtggaaatggccgcacgctttcggcagcgccgacagcccgcgcagaaactcctccgtcacccatttcgggtgcgacgttacaaaccttatccttgttacccccggcagatcgtggacggcggctatggcgtcgagaagggatcttttcggcgataagtccagcccgtaagcgagcacgttctggcctagaagaatgatttcccgcgcgccttcctccgcctttatcgcggcttccgctcgaacttgagccggagtcaggctggattccgcgccgcgcgcgtatggaaccacgcagtacgagcagaaattcgagcagccgcgcaccaccgtctggaaagcggacgccgggccgggggcaaacagagccgctcccgccgccaagccgggaaagttctcggccacagcctcccggatgatgtccgcgtagtcctgcggcctgcccgccccgacgacgtagtccacgtcgcgaatttccgcgcggatgtcggccagttcggcggagcatcctcccacgccgacgacgacgggcgcgccgccagtctttttgcgattgcgcaacacgcctatgaagctcagagccttctcctcggctttgcgccgcacgctgcacgtgttgacgtgaaccagcgaggcatcttcgggcgtcgccgcctccgccatgcccatcgagcgcagcatccgcgcgagcgacgccgagtcgtccatgttcatctggcaaccgaatgttttaatgaaaaatttgggagggcctgtctccgccatgaagatcagcctttcaactccctgaaaaagcaggaccatgctcctgtgtggcaggccccctcgccgctctgctcgacaatgaccagaagcgcgtcggagtcgcagtcgtacatcacctttttcactttttgaaaattgcccgaggtcgcccccttgttccagaactcgctgcgcgagcggctccagaaccacgtcgtgcccgtctcgatcgtccgccgcacggactcctcgttcatgtacgccaacataaggacgtccccgcttttttcatcctgaacgatagccgggataagccctttttcatcgaatttcaaatccatgtcgaaaccttctctcttggcgcaatgaggtcacagcctcatcgcgattcccctgtcccgcagatattcctttgcctgccttatggtgaaaatcccgtagtggaacagagaagcgaccaataccgcgtctgtcctgccgtcatgtatcgcgtcgtagaggtgagaaagctcgcccgctccgcctgacgctatcacagggattctcaccgcggtggagatggcgagattcaactcgttgtcataaccgattttcgtgccgtccctgttcatgcttgtgagcaggatttcgcccgcgccgcgccgttccgcctcgaccgcccagcccaccgcgtctatttcggtcggttttctgcctccgtgcgtgtagaccacccagccgtcgcccactcgcttcgcgtcgatcgcgaccactatgcactgcgctccgaaaatttcggatgactcgtttatcagactgggattcaggacagccgcagtgttgagcgacaccttgtccgcgcccgcgctcagcagttgccggatggtggcgacgttagtaatgccgcccccgacggtgaacgggatgaataccgtctccgccacccgtctgaccacatcgagcattatgtggcgcttgtccgaagaagcggtgatgtccagaaacaccagttcgtcggcttcggcttcctcgtatttttttgcctgctcgacagggtctccggcgtccacaaggttcacgaagttgacgcctttgacgacgcgcccgctgtcaacgtccaagcagggtattatccttttggcaagcaaaacgccctccgcgccgcctactgcggaaatctttcgacggcggccttgagatcgaagtcgccggtgtacagcgcgcgcccgatcaccgctccgtcaaggttcggtttttcaagagcggcgagccgctcgacatgctccacgcgggacaccccgccggcgcacaccaccgggatttccagagcgtccgccgcctgcgacatcatgtcgaaattcggctccgtcagcatcccgtcccgcacgatatctgtaagtatgattagtttagcgccgtcgtctcgcatcctgaggcacgcctctatagttactatttcagattcgtccgtccagccccggagagcgactttgccgcccttcgagtcgatggacaccgcgaccgcggcgccgaactcggagaaaagccccttggcaaaatcccgcgattcgagaacggacgtgccgactatgacgcgggaagcgccctcgtccagccagcgccggacgtcagcagccgaacggacgccgccgcccacctgcgtcctgattcccggcgacgcctcgaatatggcctttgcggcgtccaaattggaaaaacatttctggtcgagcgcggcgtcgagatcaatcacatgcagccacttcgtcccctcccgcgcccaccttatagccatttgctccggcctctccgaatacaccgtgcaaagctccctcttgccctgcgtcagccgcacgcatttgccgtccatcaaatctatcgccggatataaattcatcccttcgccatcctcccgaaattctcaagcagcttcatccccatcctctggcttttctcagggtggaactgcactgcggtcacattgtcgcgcgttatcgacgaaacgaactcgccgccgtaatccgtgacggtcatcgccagcgccgggtcctccggctcgacgagaaacgagtgcacgaaatagaagaacgagccgtcgggtattccatcagcgaccggccctctgttcctgaactcgagctggttccaacccatgtgcgggattttgaggtctcctctgaagcgagtcgccttgcccggaaaaacgccgaggccggggatgcgctctccttcttcgctgtagtcgaaaagcatctgcagtccgaggcatatccccaagaacggcttgccggatttgatttcagagacgattagccccgcaagcccctgcgattccaagtttttcatggccgccgcgaacgcgccgacgcccggaagaaccactcccgcagcgtcccggacgtcctttgcggaggtggtcacgcgcgcgtccgcccccacccgctcgaacgccttctgcacactcctcaaattgcccattccgtagtccacaatcgcaatcatgccaaatagtgtaggagttcgatatttatgtgtcaaacgatgacgtccgggcgcggcgcgtcactgattgagtttttctagggtttcaatgaatgagtctatgttgatgggtttcgaaaccgcgccgtccgctccgatctcgcgagcgagagcctcgatccgggcgcgcggcatcgcgctgaacaggaacaccatgggagccggagccgggccgctcttaatctttccgcacagttccgcgccgcttagccccggcaactgcacgtccaacatcacaagttgcggatcaaaagccgccatctcctcgaacaactctgtttcattcgacgccaccgcaacgtcgaatccttcggaaagcagcatcgtcttcaccaagtccaacaggtcgccgtcatcgtccacaaccagaatcctgttcaccctgcgcgattccacatgctccacagtctttagaatcggaatagtgaacgagaacgtcgagccttctccgggaaccgattcgacttttatccgtcctccgtgcgcctcaatgaactccttgacaatgcttagaccctttcccactccgtccgaaacaggatgcgagcctttcctgacttggaagaaaggcttgaaaatgttcttcaggtcagcggacgcgattccgatccctcggtccgaaacgcttatctccacgaaaccgtcctcgcgggtcgccgacacggcgaactgcagcctctccggcgtcgaatacttcaccgcgttttctattaggttgtccagcgtctgccgaattctgccatcgtcgcatttgacgatgacgcctttcagcgattcggacacctccttcttgaaggagtattccgacgttcggaacctgcgccggacgatgctctctatcataaggcgcgtttcgttcagccgcgcctcgaggaagttgtatatgttgatctcggccatatcgtaggtcgtcgttccgctctcgaatgcgtccagcgtgataagctcttcgaccagcttgagctgctgccggcctctttcgttgatggttttgattttctttttggcggcgtgcggcagatcctccttgagcaacatctcgctatatccgagtatcagcgacagcggcgtcctcagctcgtgagatattgaactgaggaagttaatcttttcctgctctatcctcttcctgtcggttatatcgcgcgatatgcccagcacggaggacacccgaccgtcgggggatttgatgggaacaagcctcgaacccagccagaactcccggtcgggaaactgcgtgacggtttctatgtagaacgattctccggattcaaaaaccctgtcgaggctctttttctgcctgtcggcgtccggcgagccgaacaactccgctcttgtaacccctatcgtctgttccggagtcatgccaagttgacgcgcggcgaaactattggtgtatctcacgatgtcgtctcgatcgactatgaaaatgaagtcttcggcggcttccgccagagtccggtatctctcctcgctctccctgagcgcctcttccgcctctttcatcccggttatgtccacatccatacagatgaactctttgtttccgtcccctacgtctatcggaaatatcatagaatacactacgacgctggagccgtctttcttgttgcaaatccattcggacgggccggaaggaaggttgctttcattcatctccttaagcagaatgtgaaaagcctcggttgccgcagagtcgagagtcgctccttccagagttctccctatcatctcctcggcggaccatccgaaaaccgattccgccgcgttgttccagtaaataacccggccctcgacatcgtatccctcgaccgccacgttcggcgtgttgcttatgatggcgtccaacctttgttcgctccgtttgagcgcggtttccgcttgatgcctcataagcgcgttggcgaatatctccgccaccaccgacagcaacgcgctgtggtccctcttccatcttcttctggtcttcaccgaatcaagccccatgaatccggaaagcttttcgttggaatacagggggaacataatcagcgacttgatgttttgcgcgttgaaaatgcttttttcaacttcagcgttttcaggaatcgcggacacatcgtctatagctatggtttctcccctgatgaacttgggcatcagccatttgagcgtttccaacggaatatttttgctgttctcaatctcggagctgattccctccgcgcaccattcatgcgtgttatcgacgaacaatccgtcgtcggtaagacggaacagatagctgcgatcgacctgcaggaattccccgagccttgtgagcgcgtcattcacggccgaatctatattctccgccccgacgcccacgaaactcgccgatatatccataacgacgctctggaagtcgaagttgtagcgcaacgcctcttccgcccgccttcgcgtcgtcacgtctctcatcaccgtcacaactctggcgacggcgtctttttcgaatatcggtatcttgcgggtctccgttattatcgtttccccgtcgatttcgttgatctcttcggaaagcatcatgttgccgctggtgaaaaccgatttgtattcctcccggacggagtcatcgagaaaagaaaaaacatcgaaaacgttccggcccgcgatgtccgtcggcaaaccgctttgcgcgttccattccttcatagttttgttgaaaagaacgatgttgaaatttctgtcgacgacatgaatcgcgtcggccatcgagtccatagtaagtctatacctcagttcggactccctgagcgattgttcggcgcgtcggcgctgtgtaatatcgcgcacgaccgatatgaccgtcctgttcggcgaattcaaatcgcctttcagcgagtgtattgcctcgaaatacatctccccgtccgcatatggcagagaatacgtcgcggcggatttctcgcccgtctcgaatgttttgttgaccgccttgtttagcgcttccgcggcttccggaggcagcacgtctgttggtttttttccgataaaagcctcgggcggcgcgtagagcctgtctgatctcgaagcatggtagccgactattcgcccttcaagattcacttcgaataatatatccggcatcgccttcagagtggtctcaaggcgatccctcgaatccctcagatcttcctccatgcgccgccggttcgagatttccttcctcaactcttcaataacttcgctgaactccgccgtgcgttccttcactgtttcctcaagcctttcttgatggctgagcagttgttcctctgccttccttctctccgttatgtcagtgatgaccgcgaaactgcctgaaaaccctcccacagcgtcgaaaagagggttggcagacacgagcgaatgcagaggcgagccgtcagaccgggtgaacgtcaactcgtattttccgccctcgccgagctttctccttgagaattgttttttaaatagggccaaattattcgcgtcgaggaaatttgttatcgactttccaacgactccgccgcgttcgcgcccgagcatttccaacgcgcggttgttcgcatacgtcatggctcccttttcgtctaacaccgttatgccgtcgtacatggtttctactatgagcctgaaatactcctctctctccctcagggcgttttccatctttatctgttccgtcatatctcttatgacgccctgatatccaacgaccgagccgtccggcccacggcgcgcggtcgcagttattttgcagtctatctcgcgtccgctcttgtgcctgagtttgacgtcgtaattcctgacggagccgcgggtctcaagcgcagtctgaagcggctcgcgatctctttcgtccacgtatgtcttcaacacatttctatttactatttcttctctctcatagccgagcagcgaaagcgccgcctgattggcttccagcacaatgccttcccgcgtcgatacgtacacagcgtccagagactgctcgaacagcgctttgtatctgtcctcgctctccctgagcgcctccaccgcctctttttgtctagtaatgtctatcccgaacacggtgattccggactgctctccgttttcatatatcgggaacgaattgttgatcacatgcctgatttctccagaggccgtcttgattcttgaaacgattatgtcctgtttccccgccatccctctggcgagcgtgtcaatctccattttcacatccgcaaccggcacgaactcggtcacgtgtttccccaaatcggccctcgtgtaaccgtacatctccagaacggcggtgtttgcgtatgcgacttttccctgcatgtctatttcaatcatcagaacggggatgttttcagcgatttctctgaaagctgccgagtcgattcgccccgacagacttgtcggaggcggatatgaagagttatcgggggacgattccagccgcgcgcgcaactccgcgacctgcttctccaactcttcgtatgtgggcttcttttcaggcatattcttattatattctttccggcttccgtcccgcgcgcggcctaaaatatcgcgcgctatctcaggaacataaacgccgaaatggcaaggcccgccacggccagcccccatgtccatgccagcgttttccgggtgaagacctgaacgtcctctcccagaaaacccgcgatccagacattgtgcgtgttggtcgggtcgctcacgccctgaatcatccccaccgagtagaacgccgcgactaccgccatcggcggcagcgcgccggtggaaatcattatcgccgctatccctattcccatgccccacacgttcaaaggcccccggtacaaagccaacggcgcgagcgcggtgaaaacaatcacgtagagaaccggcgcgctcggcgctatccgcctcatcacaggctccatgtatgcgccgaccgccgggtcccacacaacgcgtatcaccatgcctatccctatgattagcgccaccacgggagcgacgcccgttatcccgtcgaacaccgctttcgtcaacctctgaatcctgccgttcgggccgcggccggacacgatcaggcagtacagcattcccgcaagcagcgccgtgtttatcgggaacgcgtatcctgcgccgcctctcaaccggctggcaatgttgaatcccagaacgagagagagaggaataagcggcgtgagaaccgccagaatcccggcccgccccgcgtcccctgccgccgccgcgcctcctcccggcggaaccgcccagaaggatgtgtgaccccgacgtccgtgcaaaatgataaaaccgaggaccaccagcgcgaacgggatcatgaaaggcagaataaaacctatcaactgattctgagcgtcgatcgcgctcactgtcgagcttgccgtcattatctcagtgtaaaacttccagttgaccgggttcaacgctccgccgaggctcattccgaacaggaacagagagcctgcgactgcgggagtcacgccgatgctcatgaggatcggcagcattatagacgccaccataatgaccgctccgaggcccaccaatgacgagaataacagcgccgtcacgccggtcagcagcacgcacgacacgatcttgttgtcgccgcccagttcggacgcccatctgatgatcgtcgtggttgctccgctcgacttgagcagttcggcgagcgccgcgccgagcacgactgtaataaccaccggccacagcctcggcattccctcttctatcacaactctgaaaaattcccgcgccagaacgacggcgttcgatcccggatagctgaatgaaaggccgtggtagaaagctccgcccacgatgtacagcgtcgcggccatcagcggcaacgctatcagcgcgggcagtttccccagatacatcagcgccgcgaaagccagaaacactccgaacagagcaagccctaccgccatttccattcgcgttcacctttgttgattagtctattccgcgacttcgcggagcggcgagtctcatttctcgccgttctcggattgcggccccggataagacgatcttttgataatcaccgacgctatcctccgcccgaccatccgttccactttcatctcgtaaccttcgatatcgactgtctcttcctgtttgggaactttgcccatcgtatgaaaaatcaatccgcctagcgtttcgaactcttcgtcgtcgttgaactccgcgtcgagaatttcgttcagttccgcgatgtcgatcctagcgtccacgcgcaaagtgtccgagtccacccatctgtaaagaggctcttcggtgtcgtactcgtcccatatctccccgacgatttcctcaaggaggtcttcaatcgtcactagtcccgccgtgcatccgtattcgtcgatgactatcgccagatgcgtccgcttcttctgaaaatcatgaaggagatcatccaccatcttggattccggcacgaaataagccttgtggacgtaatctttcactgggtccgagtcgcgtccgtctttcagagcgcgcaacagagtccttgagttgaccacgccgatgacgttgtcctccccgccttcgtaaatcggaatgcgggaatgcttgtgctcttccatcagaaccgccatgcggtccaccgtagtgtccgccggagccatccgcatgtccggcctcggcgtcatcacttccctcacctgcgtttcgccgaattcgaccacgctgcgtatcatttctctttcagttttgtctatgatgccctgctctccggcatcgtccacaattcccagaatctccgactgggtgatgaacgggccttccgccgggcctgacttcccggtaaatatcctgagcgtcagattggctatcatcacgaacactttgcctatcggcgacacaatagcgtgaaacgtcgaaatcggcttgatcatttttatgaccacgcggtccgaactgttatatccgaccatcttcggaagtatttcgcagaaagcgattatcacaaacgacgccaccccgaaacttatggcgggaccgacccatgaaggccaatcagtgtgccccagcagttcttcggttatgttttcggtcattatcgcggccagcaggtttacgccgttaagacctattaaaatcgaagtgagcatgttgtttggtttggtcaaccagttgtcgatcgctcccgctcgcgcggggtgctcctctttgagggccttgagccggtgcctgctcatcgtcaccagagccgtctcggacgccgaaaagagcgcgctagccaacagcagtgcgaaaagaacaattatcgccagagtcattattttctcccagcgtcatattagaataacaaaaaatcaatgtcaaacatcgccgtctccgcgcgctaccgtgtccgccgtcaacagctccgcccggaataaacgcctcaactctacggctgtcaccctcgccgctcccgccgtcgcgctccgctgcgccaacatggcggacatgaattttatgagcggaaccgaaggcagcctgttgcgtttgcgcagacgagcaagaacgaaaaagaaaagaatcgctccgtgaaaaatggcggccctcaaaaatgcggcagctccaagcggcaaccccttcacggccacgccggtcagatgtatatacacttcctcgacgcccagcttccgcgccttgccgctcgtgcttgccgaatagcgatgtctaactttcgcgccgggcgcgtagaaacacttgcggcccgcaagagccgcccgaaggttcaaatccgtgtcctcgtaatacgcgaagaaattctcgtcgaacagccctatctcgtcgaacagcgatttcctgtagagcgccgcggccgcgcatggcccgaacacccgcgccggaaggttgtaatcccccccgtctctctgtccgcgcccccggttggagacggctccccacggcgcgtactcatcccccgccgagtcgattgttttagggtcgtcgtaaaaaactatcttgcacgcgaccgaatcgaagccgtgattagaatccagcgccgcgaccgctttttcgagccagtccgggtctggaaccgcgtcgttgttcagcagcgccacgaactcggtgtccgccgcgcggatgcctttgttcaccgcgcgggcaaatccctcattggcgctcgattcgattaattccacgtcgggatgattgttttttattatttcgcgggagccgtcccgcgacgcgttgtctatcacaataactcgctgcccgcccagagtctggctcgcgagcgcgccaagacattcgccgatatatttctctccgttccagttcgggatgacgactgtgacgcgttgcgggttgtccatcgagttcgcgctccggcgcggcgcgggcgttccgccgcccttgcctgccgtgttcaggttgttcttctctgcggctgtttctgtatgcccgtcatcagctccaacagatagtccctgtccatagacttgttcatcgcgtcctctttggtgatgatgtttttcttcatcaactcataaagggcttgttcgagagagagcatgccgatgttctttcccgtttgaatggaagcggggagttggtaggtttttccgtcgcggatgaggttgcgcagcgcccctgtgggaaccattatctcgaatgctgcgacgcgcccgcgccctgccgccctgcggaccagagtctgcgagattatcccctcgatgttctgcgacacctgcatccttatctgcgactgctgttcgggaggaaaaacgtcgatgatgcggtcgaccgtctgggccgcgcccgtcgtgtgtagcgtgccgagcacaaggtgccccgtctcagcggtggtgatcgcggtggaaatggtctcaagatctctcatttcgccgataagcaccacgtccgggtcctgtctgagcgcgctcttcaacgccgccgagaacgaccctgtgtcccgtccgacttcgcgctgattgacgaggctcttcttgttctggtggacgaactctatcggatcctcgatcgttattatatgttcttcgcgggtcgcgtttatgtggtctatcattgccgctagagtggtggacttgccgctccctgtgggtcctgtcactaggataagcccgcgcgggcgctcgcagaacttcttcaccaccggcggcaggctcaagtcctctatcgaccgaacttttgtagggatgactcgcagcacggcggccttcgtccctctctgatggaacacgttgacgcggaacctcgccttgcccggatagtcgtacgcgaagtcggactcccacgtctccctgtattccttcgcgtgctcctcgtcgagcatgctgtttatcagctcgtccatcgtctggggcgtgagtttcgccagattcgtctgaagcgcgattttcccgtctatcctcaacatcggatggttgccgactttcatgtgaaggtcggacgcgtcgaactggagcattacgtccagaagctctcttatatgcatctgctgttatcctctgcccactagtttggagaattcagggacgttctggcatttcgccaccgcgtcttcgaacttgacgagccgtcgtttcatcagttcggccaagtgctggtccagcgtgtgcatcccctgctccttgccggcctgaatcgcctgatgaatcatgaagaccttgttctctcgaataagactcgatatggccgagttgatgaccattatttcatgcgcgacgacgcggcctttccccgtcgccgcgggcacaagcgtctgagacaccacgctttgcagagtcaccgaaagctgcattcttatctgctgctgctggtgcggcgggaacacgtcgatgaccctgtttatggtctgaaccgcgcctgtcgtgtgcagtgtggcgaacacgaggtgcccggtttccgccgctgttatagccatcgagatcgtctccagagtgcgaagctcgccgacgagtatcacgtccgggtcttcgcgcagcgccgagcgcagcgcgcggtcgaacgacttggtgtcctgcccgacctccctctggcagacgctgcagttcttgtccctgtgcagaaattcaatggggtcctcgatagtcaggatgtgctctcgccgagtctgatttatgtggtctatcatcgccgcaagagttgtggacttgccgctgcccgtcgggccggttacaagtatcagccccttcgggcggtctgaaagctcttccagagtgtccggcagcgccagttctttgatggtcagtatttttagagggattgttctcagcaccgccccggtaagcccgctctgcttgaacacgtttacgcggaatctcgacactcccggcagactgtatgacatgtcgcactcgttcgtctccacgaactcgcgcaactgcctctcgttcatgatggatttcgccatcacgtccacaatctgcgggggaaggacggagcgcgggtcggcagggcggagccttccgtccagacggaagaacaccgggctgttccctttgaaatggacgtccgacccgttgtgctcggccagatacctcaggtacgcgttcagcctttctttcggcgctatgttctcttcgagcgaaggcagtaccggctgcggtttctgctgttgcggttgcggtctttgcatcgacatttttctatggcctcaaattctgcgcttccgccgggcgcgtctcgcgccgccttcggcggttatttcaaaaatcgtccggccgacagtcttacgctgtcagcgccttcaacacgctgccggccgccgtctcagagcctctcagcggccgcagatatctgtccttgtccagcttctccagcgtgtccctgctccagaacgagcaagtatccggcgtgagcgccccgcacacgcggaaaaagtcgttcgagtccttcccgaattcgagatagtaatccgccagagcgatcccgcgcttgtaaagaaacggctgcagagccttgttgacttgagccgccctcgttctcatcgtcttcacgtcgccgtccgtcacttccgtgtagacgcgcgcgcgcatccccggctgaaactccttgaccgcgtccatcttcacgttgaattcgattatggtcacagggagtatcgagcctgcggcgagacgcgtgcgggcggcgaactcatctgaaaccatgttgcgcaccgccacgcgggccgggattatccgcgccgcgacggtctccatctcggactcgcccgtctcgcgcgcgaaatgtgtcgccactccgcaatcttcaagcctcttgaagagcgcggcggcgatcttcatgttcaacgcgcctttgcccggaaacatgggcgacctttccgcccagcattccaccgcgtcgttcgtgaactcgaccgcgaaccggtcgggggacgcgtcagactgatatacccgcatccccggcgtctctcttatcaaagcgcctttccccatgtctttaccccgcgcgggctattccttcgccttccgcgcccgcgctttcttcttcgggaaaaatctctcgtatatttcgtccacgtgccttatgaaatactccacttcaaaacactcctccaactcggcgggtttcaacagcgccgccacttcggcgtcagccgacaacagcgacttaaactccgccttctccgcccacaccctcatcgcgttgcgctgcacgatgtggtacgcctgctccctcgtcgctcccttgcccaccagcgccagcatcacccgctgcgagaatatcaatcccctcgtcttgttgaggttttcaagcatcgcgtccggatacaccaacagcttgtccagaaggcgtttcagcctgaccagcatatagtgaagcagtatgcaactatccggaattatcaccctttccacagacgaatgggtgatgtcgcgctcgtgccagagagccatgttttccatggcggcgtgggcgttggcgcgcaacacgcgggcaagcccggccagacgctcggctgtgatcgggttcctcttgtgaggcatcgccgacgagcctttctggcccttcgcgaagaactcctccgcctctcgaatgtccgttcgctgaagcccgcgaacttcggtggcaatcttctcgatagtgccgccgaccaccgccagagtcgacatgaactcggcgtgcctgtccctctgaatcacctgcgtggcgataggcgcggccttaagcccaagccttcggcaggtgtcttcttcgacatcggggggcaggttcgagtaagtgcccaccgcgcctgaaatcttgccgacagatatcgtctcgcgcgccctttcgagcctttcaaggttgcgccccatctcggccagccacagcagcatcttcattccgaaagtcatcggctcggcgtgtatgccgtgcgtgcggcccaccatgacggtgaatttgtgctctatcgcgcggcgctctaaaatgacgcggatttccttgacctccgagatgagagcgtccgcagactcgcgcatgcggagcgcctgcgccgtgtccagcacgtccgacgacgtcatccccacgtgtataaatctcgagtccggcccgacattctccgccacgttcgtcagaaacgctatcacgtcgtgatcggtctctttctctatctcgtctatgcgctgaattgtgaacgccgccttctttttgatcgtcgacagcgctcgcgcgggaatttttcccttcgcgtgccacgcctcgcacgcggctatctccacgtccagccacttcctgaacttgttctcttccgaccagatcgagcgcatcggctcgtatgtgtacctgtctatcatctcgtcgaaccgccctccgaaaagtagttcctgtagcccaaagtcctcaggcgttcggatttcttaattacagcctcagcctgctgcgccctgaacctgctgtagcgcgaggcaagctccggcttgcccagagccagtatctgaacagccagcagagccgcgttcttgcatccgcccacggccaccgtcgccaccggcatcccggcgggcatctgagctatcgacaacagcgagtccagccccagcatcttcgactccatcggcaccccgatcaccggcaggttcgtgagcgccgcgaccactcccggcaggtgcgccgccgcccccgccgccgctatcatcacttttccgccattgttgtcaaacgtcgtcactattcttttgacatagtcgtgcgtgcggtgcgccgacgcgatatgcgcctcgtacgacacgccgaaactgtccagcgtttcaaaacacgccgtcatgcttttaaggtcggaatcgctccccataacaaccgccacatccggggcctgcgccctcttctgcctagcggcggcctttttcttcttttccatttatcatttttctcccttgagagtatttattctggattttctgatgtttcttttcggagaaaccttcggcagctcgtcctccacctccactcttatcgacgccacgccgtccaaagcccagcccgtcagcttgcccgctcttccgcccctgttccggtcttcgtcttcatactcttcgtcgtcttcgtcgtccggcccggagaaccctaatgactcgatgttcgccacaagctcgttgttcatcggacgactcgaaaactccttcaacacttcatccagacttttctccttctttctttcgcgaaggaaatgagggtctttttcgtcttgtctttcctgcccctcgacttggatttttatcagcaacatttccggagccgccgacggaagctctctggctccggagaaaacgcttatcaccgcgcgtccgggcgctatgtcggctggcactttcaaccatattttttcctcgaccgtctcgctcctaaacggccgcacccccactttcagccccagcttctgtccgcgcttcaccacgggcggacttgccttttctttgtttgccttttctccagccgcgttcggctctttttcttcggctttagcttccggctcggcggcgggctctttttcgcccgtcttcgtttcttccgcttccggcttctcttcgtccccgccgtctatctccactttttctataagcgcgtaagagttcctcgaatctatctcgacgttcaggttcaacttgcgcgcttccgcgtccgcgtatttgttgtccttaagcaattgaagcgccgtcacgaactccaccagagacaacgccgcgatgtcgtccccgtcgtaaaacatgttttccctttcgaccggtttttcgcaggccgagcatcctatggaaaacgacactctggaggttcctttgccgagcctgtcgatggtgttgtcgagactttgcagcgcggccatcgccgccagattgctcaacaaatcctcgtcccgcgccaccttgaacgaatacttctccgtcttgccgatatctccgtcagtgacggttatgtcgaatggtatcagcagaggaaaactgtccagccgtcccacaagagcggggccgcggtcctgagttatctctcctcgcagcgccccggtcgcggcggctttgaacgacatgtcagtgcctcgcgccaccgcgagcaccggcgcgtccgccagcagataccttacatcgcccttcctgaacagcggatgcccgaacatcagggcttgcttgccgtccacgtgcgtcaccgttcccgccgctgacacttccatatctcccgtcagaagcagcacggccaccgaactgccgggttttatctccgagccgggtccgattacggtgcgtcccgttttcgccccagcccatgcgccgcccgcgtccgtcacttctattcccgttccctcgaatattctctttgcaaaaggcatcgttcgcgccgtcaccccgcgaaccatcgccggagccgccgccgcgctcgcaaataatgtcccctctatctcgtccctgccggattcataacttattctcgtaaaaacctttccgccatgctcgaaaggcgcgtcgaactcgaccgtcccggccctcggcgcgtcatactccgccgccttcagcatggacgcgatatccgtaactcctcccagatggtggtccgtcatcggaaacgtcattgaaagcgcgccgacaagcctgtcgccgatatatatcggggaaccgctcatccccattgacactccgccgtatttctcgcgctccggcccggtcaactctatcagtatcagcggccccccgctgaccccggcccccggcataactcctttaactttcaccgggaatttcgatatctccagcccctcgaacaccgtcagcccgtatccttccattccgggcttgacctctgacgcggacatatacgaaacagccggagccgccccggcgacgcgcgtcatcgccccggaaacgaccgtcacaaaaaccgccagcgctccgagaattatccttgcttttgatttcatcattatgttccgccgcgaccgcgcgcctattaaaaatccgcgtggcgacgcggcaacaatctcaacatcaatacctcgcgcgcagttcccgtcgcgcggttaagtctgatattatatctcattatcaaatcaaattaaaacccccgtccgcctctccccgcgccctcttttttcgctccgatggcgctatccgccggaaatatgtaaaattccatataagttgtcaggcttttagccggctccgggagatttgttcatgattatcaataatttcaaagtcgaaggtttcaggtccttgaaaaaactcaacctagaccttatgcctataaacatcctcatcggccccaactccagcggcaaaagcaacataatcagcgcccttgaacttctttccgacgccgtctccggcaaactccgcgacgccattatgaaaaaacacggcggcatgatccccattctttggaatggaaccgcaaaggaaatcggttttgaggcaacaatacgctctcatcgttttggtttcaacgaaaacccggaagaaaacgcatccgatttagtgaaaagacgatatgtttatagtttaaaacttgaacaattgagagcctcaagcgaatatggcattgaattagaaaaactccatgtcgagaatattgccaatgatgatgatttatccaattacacaggcacgattattaacagagatggaaaagaatatttcacgaaagaaattaatagcgatattccagcggctgtgttcgatatttttaaagatagcgaatccatgttttttaatatggattcaatcaaaagtggatggaaaaattatactgaattacaaatatataggttcatcaatttttttaatgactgttcattttaccgaaatctgaatcatggcccggaagcagcggctagacattcgactgtcgcgaggtcggaaaaggtgttggaatcgaacggcgataacctcattgccgtccttcacactctttacaccggcaataaagagttcaaagaacagtttaacaacactctcgaagcggctttcggcgacgactttgaagaactgacattcccgcctctcgaaaacggcagaatctatatgaaatggcgctcgaaaacgcttaaacgcgagctttcacccgccgacctgtctgacggaacgattcttttcctgatgctttccgcgattcttctctccccggaacccccgccgataatctgtatcgacgaacctgaacttggaatgcacccttctatgctcggcatcatcgcggagcttatcaaagacgcgtcaaacagaactcaacttattgtttccactcattctcccgaacttttaagcgccttctccgacatgccggaatcagtcgtggtcgtggaaaaaaaagacggcgcgaccactgcgaaaagactcgaccgcgattccctttccaaatggctggaggaatacaccctcggcagattatggctcgatagagaaatcggcggatgatccatgaaaatacttcttttcgtcgaaggcgataccgaaaacaaaacacttcctgattttcttaaaaaatggctggattccaagctggacaacaggatcagcgtcgaacctattgttttttcgggttgcggcgattatttaaaacgcgccggcaaaaaatctcaattacatcttgataatagcgaagtaatcgccatcttcggcttgctcgacctttatggattgcccgaaaagtgcaaaggcggaaacactgtcgatgaaaaaatcgattttgcgagaaaaagaatcatagaatctttgccggaagaatgcagacctagattccgccagcatttcgccgttcatgagctggaagcatggttgctcagcgatcccgatatattccctcgcgggatcaaactgccagttgaatgcggaaatccggagacagtcgacttcgataaccccccggcaaaacttctcaaggaactttttaggaaatataaaaaaaattacagctataaaaagaccgttgacggcgtcaatctgtttaaaaaactctcgcctaaaaccgtgcggaaaaaatgtcctaatttcaagaagtttaccgatgaaatactggcagccgccgaaaacgctcagaagcggagccttcctcgttgaaatcggaggccggcatggatgaaatcatgactcagtcgacaaaaaagaaaatcttcatcgtcgcgggggcgagaccgaacttcgtgaaagtggctccgattatgcgcgcaatggcagaaagcccctccctgcgccccatcctcgtccacaccggccagcactacgaccacaatatgtctcagagttttttcgacgagttgaacatcccccggcccgacgttttcctagaggtcggctccggcagccacgcggcccagaccgccgccgtcatggtagccttcgaaaaagccgtgctcgaattaaaacccgacctcgttctagtggtcggcgacgtcaactcgaccctcgcctgctcgctcgtgtccgcaaaactcatgataccggtcgcccatgtggaagccggtctccgcagcttcgaccgctcaatgcccgaagaaatcaaccgcgtcctcaccgactcgatttcatcttacctcttcgtcaccgaaccgagcggacgcgacaacctcctgcgggaaggcgtcgcggaagacaacattttcttcgtcggcaacgttatgatagacactctggcggaaaacgcgcggcgagtgaagaacggcgaggcggtccgccctctcggcgatttctccggcgattacgccgccctcacccttcacagaccctccaacgtggacgacccggcgacattctcccgcatcatatccgcccttgaggccaccgcctccatagctccggtcttttttccggcgcatccacgaactgtcaacaacatccgcagattcgggctggacgaccatttcgcagcgtgggacggcgcttcaattcccgccggaaaaatcttcatcatggaacctctcggatatctggaattcctctcccttaccatgaacgccaagatcgtcctcaccgattccggcggcattcaggaggaaaccacttggctgggcgtcccgtgcgccacaatccgcgaaaacaccgagcggcccgtcaccgttgacgtcggaacgaacatcctcgtcggctccgacgccgaaaaaatctcccgcgccgccgccgccgccctgcgcggcgactggaaacagggccgagtccccgaactctgggacggccatgccgcctcccgcatcgtctcaaaactggaatctctgttatgttaagtttgtatcaacatcgccatacatctggttttcatcgatctaagaaaaaagccgattttgcaaagaacgaagttcagcaaaatcggcgaccaagagtttttttcggaaggggcgcggggaaacctgttttttgcaaaaaaatggtttcaccgcaaattactaaaaatctattatccatatattattttttccctcgctgacattgcttttcaataatgatacaatacggttgcggaggaatccgcgcgctatattggcgtacccggaatgttttcgggcatgtttaactgcggcaggttgtcttatagtgtctgatttgctgaaaagaaaaattgttattgcggcggcaacggcattggccgttctcgcgactctgtccgccgctgtgcccgcgcgcgctctcaacctccactacacaatcaccgcaaactacataatgttcgacatagaccgaaaagtgatttactgcgacggacaggtcgagcttcttcacggcaaccttcgctttcaagccgactcgatacgggtggacgtgaaatcgcacatcttctacgcagaaggcggcatcgtcgcttccactatgaagaaatccgcttccgcgctgccgggcgacacggcttcgccgtccaccaaccctatattgacggacattgaagaaaccggcgacctgctcgaccagcgcgtcgaagctcagatcacaggcatggacggcgcttcattttcaggcgaccaacttaagttcgacttggatcgcgcggcgggcatcctcactcaaacccaaagcggcgtcaggactttttatctggtcggcgaagaactcaacgagacggcccaagagcctctgatgggacaggcgttctacatctacgaagagccttatctcaccgcaaacgccgtgaccgccgcccgcatgcgcatctatcccggcgaccagtacgaagcgtggcgcgccaccatgtgggtaaaaggcaacaaagtaatgtccctccctttctggaccaacaccagcaaaaaatacaccaccggcaaatggcgcatccggaacgtcagctacggctcaaacgcggactggaaagtcggcgccaacgtgcgctacaaggaagcccgcgacttcaaaggcttcgtcgatttgaactaccacggggacagctcgaacacatattccgcggacctgcgacagtcgttccgcatgaacacccagacaagcggccagttcaacatgcgcaacctgttcggcggagacaggggctacaccatgtccatgtcgcgctacgccgccggcatgagatcgcaaacccttcagatggactacgacctttccggggcgaaaggattccggctcggagccgcgggcggcattaagaaaaccagaataaacggctacctctcaggccgcagaactggagacggcgactacggccaatcatccatgaacgccctcgtcagcttcgacggcaacagaaagttcgtcaatggcaacacgcggggcgtcggctattccgtaagctctcacataaaaatggacaacttcgattataccgacgccgtgacggcggcctacaccaccctcaccgccgtcagcccttcaatcgccctgtcaaaaaagaccagcattgattggaacacagccaccgggcttggcggcgacaccgaaggcaggcccagcgcccgcctgtccgcctccgcccgcatcggccacagaccccggcagggaatgttgattcaggcccgctataatttcactgacagcagatacaccggctcctccaccgtcaaacgccagcttatgttgtacgtgtcgaagtccaaagggcttaagtggaattccgccctgtcggcgacttatgacatccgcgaagcaaccatcagcagcctgtcttccggcctcgattacaccgtcaacaaaaaatgcagactccgcacggacttcatttacaatctgaaaaacaaccatttctccaccaagaacttcaacgtcgactacgacctctacggcacgcgcatcaacacccgctggttcgccgacaccaacgatttcatgatcgacttcacatcaaattactaagccggatttgcgcaatactgttcaataatcacaaaaataggagcaatagccgaagcgccatttgattttacccattgcgccgagcgccgctcccaaccatattgtgaacgcatagcgaaaaacggggacttgcagcgctgcatttcgcgacgggtgtccgtttttctcaaagtcaccgcccattgtttcctgttaatatcatgtagacaatggctaaacataataaaataaagcttatagacgcaacaacctttatggcaatgtttacatcttgttcatcaagatatgtttgcttaaacgcaatgttttttcttcttgtcttgatcgccaacgctaaatagtatttaataaagacaaaaagatttataattaaaacaatcaaagcaattggatttatgcaaagcttaaatgatagatcttcatcagacacatctcttgtgagcatcataacgaaccatgccacaataacatttacaaatgctaaatttttaaacgcgcgatgtcttttctttattacattgtatgccacttcgataataaccgctgttaataataacaataagaacaacattgctaatatgcgccttcacaattataatctgctcgattttctcttttgattctaaaatacgtttctacttcgtcgatgacttctgtaataacacgaccagtcgccattattagccaccagttcttttcgttctgcccataatggatgcgcgatggattggcaaaaacccaaaatggtcattcacccatttctgagcgagtcttggtcatgctttacggtcgattcggttggttttccgggctgctttcgccttccttcttttcctgatctttgatctttccaagaaattcgggaaggctgactccagccatctcgcagacatcgtgcatcgcaggcagcattttcgtgaaactgcctaaccagttggacgctgtcgagccgccgccattgccgccgccgccgcagtcccacactacgatcttgtcgaatttaatgttgcttatcgcttctgcctgcgcttttacgatttccggcaactgctccactatgagcaacatggcggctttttccgcgtcgccgttcgcggcttttaccatctccgcgaagccctcggccttcttctttaggatttcttggatgcctgccgcttctccgctcagccgctctcttatttccgcgccttcaccctgtcctttaagtgtttgttgttcctttatcgcttccgattctatgattaatttttctttttctatctcagccggcacaaccacatcggctttgcgggtggatttttctctatcagccctagcttcctccgcttttttctcggctatgtaggctagggtggcggcctcggcggctttggttttttccgcggcgacggcctttctctctgcttcggcttccgcttctcgtctgtcagcgttcgagttggcctcgactactttagcagtgttctcgcctttaatggcttcggcattggcagtggcaacgttaacgcgcatctgctgttgcgcgttcgcttcgccggttttgccgtccctttcagcatttgcaatattaacgcgcatctgctgttgcgcgttcgcttcgccggttttgccgtccctttcggcatttgcaatattaacgcgcatctgctgttgcgcgttcgcctctccggtcaggccgtctttttcggcgtttgcaatattaacgcgcatctgctgttgcgcgttcgcttcgccggttttgccgtctctttcctgctgggccacttccaccttggctttgtttatagcctcggcagccgcttttttccctaacgcctctatgtatcccgattcgtcggagatgtcggtgatgtttacattgattagcttgagaccgagcttctcaagttcagattcaacattcttcattacttcttcttcgaacttttcacgtttcgcattgatctcttcaatactcatcgttgctatggtagcgcgaagttgcccgaaaataatgtctttggcattttcctcaatttgctccttgctcatgctgagaaggcgttctgcggctaccgtcataaccgatgggttggtggaaatgcctattgtgaatcgggatgggacatccaccctgatattctgattcgacaacgcgtttttcagaccgatgtcgattgtcatcggcgtgaggtcaagatattcgcaagcctgaaaaagcggccagacgaacgctgcgccaccgtgtatgcacttcgacgtttgacccttcgccactttgccataaacgaccatgatctggtccgacggacaccgccggtacctagtcatcgcggcgagcaaagtcgcgaaaagcacaattgctactacaacaagaccgataagcatgtacatttaataatcctccgcaagaaacattatttgattttttcaatcaccaaggtttgatccccgaccgtctctattacttttatctgttctcctttatttagcctatctccctttgttgccgcatcaagctctaccagtcttccctgaagaacaatattgacctttcctctgccattcatgttttcgggcactgctatcgttacagagccttcttttccgacggcgtttttcagcgacagagttccgctgcttttcatggaagaaagccctttcataagcagcatcaccaacgctacggttacaactccgcaaacaccggcgatgattaccgtgatcgacttcgacaagcctttctccaagcaggccaaaccaaaccaagagaaaccgaggaaaaacgccaccatgtttctgatggtaaaaaaaccaagaaataaatcgctatgcgtgtcgctgcccggatctacatctccggagtcgatatcgtcgccccctgcgaaagtgaatatgagctggagcaagaaaaacaccgagaatacaacagcaacagcccaaaataccttttcaaaagagcttaatgcaccccaccatgcttccatttttcaccttcacaaataaggatttcacctaacattattcgcaaacatctaaaatgtcaataaatgagcctgtcattttgccttgatgtggtgtctgtagtgataaagctattcctgcatttcaatatttccatcagtcaccccgagatgaatcagagcaaaaccgggaaccaccacaatgctaaacaactaaaattgctagaatatcccggtacagccgcctatttacgcctcctttatttttgctgttctcgcatggtgttactataccatatcgggcggtcttgttgtcaatcgtcttgagcttccccccaaaaactggacagaggtttaaggtggaaaccgtggtggtgtagaatccagttttggagggatgagcgatgaggaagaaattcaccccagcgttcaaggccaaggtggcgcttgaggcgctgaaggggcagaaaacggttgccgagctggcgaagatttacgaggtgcatccgaaccagatcgggcagtggaagaagaaggtgctggaagaattgccgggtgtattcaacggcaagcgggccagagaggacaaaggccgggaggagcatgtgggggagctttaccggcagatcgggcagcagaaggtcgaattggactggcttaaaaaaaaatctggacttgccgactgagcagaaacggcggctgatcgacccttcgagagaggcgctgccggtgtggcggcaatgcaaactgatgggactggcgcggtcgagttactactacgagccatgcggggaaagcgagtacaacaggagcctgatgaagctgattgacgagctgtacacggagcatccgagtctggggtcgccgaaggtcacgaagctgctgcgaaacatggggcacgaggtgaatcacaagcgcatagagcggctgatgagggtgatggggcttgcggcggtgtatccgaagccgcgcaccagcattcccgacgccgcggcccgcaagtatccgtacctgctggcggggctggcaatagagcgtcccgaccaggtgtgggccacggacatcacgtacatccgcatgcgcacagggttgcgtatctggcggcgatcatggactggtacagccggtacgtgctctcgtggcggctgagcattttcatagacgcggcgttttgcgtggaagcgctggaagaggcgctttcgcgcggatggccggagatattcaacagcgaccagggcgcgcagttcaccagcgaagcgttcacaaagccactgctggacaggagcgtcgccatcagcatggatgggcgcgggcggtacatggacaacatcttcgtggagcggctgtggcggtcggtgaaatacgaggaggtttacctgaaggattacgccgacgtatgggaagcggagcgtgagatttcgagatatttgcgctggtacaacgaagtgcgccctcaccaggcgctgggctacgcgacgcccgcccaggtgtactttgaccggagcgtcgaaattggcccgcagggcttgcgaaacagcgcggcgagtgatattgtggcggcgtaaaagaaaacgcgccacagaggaatggaggggcgttttacagagagaaaaaccgcccggcgacaggaggtggcaaagcaaaacaatcgaatgcggggacttgggaaaactcctcgcgtgtgagcacacgtacacgcgcgcgcgcacgcatgatgcgtgcgtcaggaacaggcaaagtcaaaggcaaaagactaaaacctacaccaaaccccaccttataaacccccattttctgtccaaccaatggggggaggttcctctgtcgctctttgggttgataataatagacgtctgttctttgatagaaacatccgatggttatattttttattgcgcatcagttatcataaaacaaaattgagaagtttgggaaaagggggttggggaaagaacccttttcaaagggtttttccccaatcgccaaaagcgacagtctcttgtgtcggtttatcaggattatacagtttttcggatttatacagtttttcaggtttagaccgggtcaaccgcgtcgccgagcagcgcgcgggaaaattcggaggcgttgaacggcagcaggtcttccatcttttccccgacgccgacgaacataatcggcatgcgccattccttgagtatggagaatacgaccccgccgcgcgccgttccgtccatcttcgtcagcacgagggcgtctatcgggacggcctgtccgaactgctgaacctgattgtatgagtttcttccgatggtggaatcgaggacgagccacgctctgaagttctcgaccccggctttttccaccgccacgcggtggattttctggagttcgcgcatcaggttggattgagtgtgaaggcgtccggcggtgtcggctataagcaggtcggcgccgcgcgcgcgcgcggcctgtatcgcgtcgtacatgaccgccgagggatccgcgccctctctctgccttattatcggcacgtccgaccgcttggcccatatctcaagctgctcggaagccgccgcccggaacgtgtcgcaggccgccagcatcaccttgcgcccttcggctttatagcgcatcgccagcttgcctatcgtcgtcgttttcccggagccgttcacgcccatcatcatgacgacgttcagcccgggggccaaaggctccgccgcagcgcccgattcgagtatctcggagagtatgtccacgatgagcgcgtttagcgcttccgcgtccggcgggcgtttttcgaccgctttgcttttgatttcatctacgatcagcgcggcggtggacgcgccaacgtccgacaacagcagcgcttcctccagcctctcgcagaactcgtcgtctatcttcacggcccgccctatggcggctgatattttatgccgtaagctgtcgctggtcttcttgagacccttcttcaatctgtcgaacatggttgttattccatggataccgtaaggagcttcgagtatccttcctgtttgtccattgttatgccgaacaattgatcggctcccaccagcgttcctttgttgtgggtgacgaccagaaactggctgttggtcgaatgttttttcagcatttcgcggaaccgcacaatattgctttcgtcaagcccggcgtcaacctcgtccagcacgtagaacgggctgggtttcactttgagtatggagaaaatcagaaccagcgcgcaaagggctttttcgccgccggacagaagggttatcgccctcatcctttttccgggaatctgcactgaaacgtccacgccggattcgagagggtcgccgtcgccgacaagcatcagctccgcctcgccgccgccgaacatctcgacgaacgtctcctgaaacttctccctcacccgctcgaacgtctccatgaactgcgctcggctgcggtcgtcatactcgttcactatgtccatcagggtcgcgcgcgcgtcttcaagatcccctatctgctcgctgagcaggtcgaatctgttggacttctcctcgtattcgccgatagccagcatgttcaccggctgaagcgtctcgagctcttttttcagcgcgaggtagcgtccttttccggccgggccgccgtctgcggtttcctcaagcgcccgctcctcggagacatcgtcgaactcctccgagaactgccttctgatctcttcgagttgcgtttcagcgcgcgcgcacttcatctcgctgtccagcatcgcttctttgagttcttccagtcgggtttcaacagcgtgtatctcgccgcgcagccgcaggctttcgtcttccatgcctttgagagcggtccgtttctgcgcgagcgcggattccgcggcggcgcgcgcggccccaagctccttcgccagcgcctcgcccgctttcatctcttcggaagtccggagcctgtccgccgacagcttcgacttctccgcgtcgatatccccgcttctccttcgcacccgctccaactccgcctgcctgtacttctcggcgtcgcccgccgcctctatctcccgcctcagttcccccatctcgacgcgcagatcaacctcgcgcatctcccgtttcctgaacgcgtccgctatctcgtccagccccgactgcgccgtcttcaactcggcttcgaggctctttctcttttctgaaacttccttgaacttcgattcgagcttggcgacatccgactctgagccgcctccggttgacgcgcattcggccagcgctttttccgccgattctaggtctttcgtcagaatttcgacgcgctccacagccgccgccgcgcgctcgcgcgccgcggccagttcgatattcagtttgttaaattcttttccagacgcttcggacgacgacctcagcgacgcgtatttcttttcagcctcttcgcgcgcggcgcgggccgccttgacttccgcgttcttcttttcgagttcggactttagctcggccacgcgctctcttgcggcctcgctggtcggcagagcttcgcccgtgaacagcgtcccgttgataaaacacgccgctccgtccgccctcacaaccccggctcccgaaggcagttccgaaatcgcctctttcatctccgcgtcggtgtcgacaatcgcgaacattgataatacattcagcaactcgttcggcgctgcggatttgaccgaaaccgcgtccgacaggagccgtttcgcccattttttctttttgagagccgccgcagccgccgccccggctcctgagaaccagtcaagaatcagcctcgcggccccgccgtcggcggcctcttcgagcgccttccctatgtccgcggacgtcgaaatagaagcgttgaaaagctcgttcaaagcgcggcgcgcggcaggctcgaacccggttttgatctcaatctcgtcggcgagccgggcggtttgtttccctttttcgctcacggccatcaggcccgctacgcgttcgatagcttcgacccgcgccgacaaagcgttgcgctccgcgacgaccgcatcaagcgccgaccgcgctttatcccgcgcggcggaagtttcctcgatgcccgcgcgaagcttttccgcctgcgattctttttcgcggatttgtttttcaaattgcgaaactttttcgctctcggacttgccgcgttcccgcgccgccgacagcctgtcccgcgcggaatcgcgggcggaggtcagagacttcactcgcgcggccatccccgcaagcctgtctttcgccaccgccagctcgcccgcaaggctcgcctccagcttcttcaaatcctcggcttccggcagaagcccgtcgcgcttctctgtcaggtctttcctgttcagcttcagatcgtcggaggattgttttgtggcgttttcaagttcggcggcggcttcatcgagcctgcgttttttctgctcggccttcgcgcgaaggtctaatatgtctttttcgagatttttctcctgctttacgatatcggctttttcgatgtcagcggcggcggcccttctgtccgcgtcttccaccgcgcgggccagcagcctcgcggattcctccgcgcgccccagtttcgagccgatgtccgccaactcgcgcagagccgagtcgatttccgcccgcgccgcgtctatgcccgcacccacattctctctggactgtctcagctcgccgactttcttcagcccttccgccctctttgccttaaggccctctccctcgacggaaagctgttccaagcggctcttcaaacgccttatctcggacgcgaaaacgcccagcttcagcctttccatctcctcgactatctcgtcgtaccgcttcgccttttccgcctgctctttcaaaggccccagcgattcggagatctcggtcagaatgtctttcagccgggagatgttgatgttcgtgtctttgattttcgacagcgttttggttttttcgattttgtatttatttatcccggcagcctcgtcgaatatctcccgccgctgcgagggggacaagtcgatgacgtactcgacgtcgccctgattgattatcgaatagttcgtggtggacagtccggtgtcgatcagcaactcctgaatgtccttgagcctgcaagactcgttgttgatggcgaactcgctctcgccggatttaaagtaccttcgggttatcgagatttcgctttggggtagcggaaaatagccgtcgtcgttgtcgaaagtgaggacgacttcggcgaagccgaggggcttgcggctggcgctgccgtgatagacgacttcttcgagcttgcggccccggatcgagcgcatgctctgttcgccgagcgcccaagttatcgcgtccaccagattgctttttccgctgccgttcgggccgaccaccgcagtgacgccctcgcggaactcaaagaccgttcggcgggcgaacgtcttgaatccgaacattgacaccgatttcagatacattgcgggccttgttgttttttatcgtctcaggagccgtcggcgctcatgccgagtatcgccgcgcgcgccgcctccgtctccgcttcctttttgcttcgcccctcgccggttccgtgcgaggccccgttgatgaagacctccactttgaacatcttgcggtggtccgggccgttctcggatatcataacatatcgagggagagtcttgtggcgtttctgagcgtattcctgaagttccgtcttgaagtcgcgcgcggcctcgccgcccgcctcctcaaggaactcagacatccgctcgatgacgaaatcgcgcgccctctcgaatccttggtcgatgaagacggcccctatcagcgcctcgaaacaatcgaccacgaacgccgtgtggtctctgccggcagactcctcgacgcccttgccgacccggatgaaatctccaagctcgattcttcgcgcggctttcagcaaaacgcctttgctgacaatgtgcgccttggccttgctcatcgcgccctgatcgtcttccggaaaagatttgaacaggcgttcgcagatggaaagagctagaacggagtcgccaaggaattcgagccgctcgtagctgcgttcaagccgctcgcgttccggcagcacacacgaaccccagtacgacggatgcgtaagcgccgccctcaaacccgactggtcgttgaaatccacgccgatgattcccagcaagtcctcgagcggcctcgggaatccttctctgtcccgaacttcgaggggggaaaggttcaacgggtcacacctgccgttttttcagataatcggcggcgtctcccaccgtgactatcattaccgcgtcctcgtccggcacttctatgccgaactcgtcctcgacggccattatcaagtcgaatatcttgcgcgagtcggctccgaggtcgtccctgaacgacgcctccatcactatcctgtcctccgacacgccaagctccgccatgatcactttcttcaggcgatctatcatgtctgacatttatcgtcctgcctccgttatccctcgactttggtcacaagaacagtcttgcccttgtagtagccgcatttcgcgcatgcgcgatgcgtcatcttcacttcgtggcactgcggacattccgtcagcgtcggcgtcttcaagcctcttttccactgcgccttctggcttcgtgtgctcgaacgcgatttcttatatttcggaagcgccatcttctttcacctcccgctccatttttctctctaaaaactttcttccttctttcaccgtgctcataactttgtgcaatgtttgctccagattgtcaagcgtctggagggcatacatttccgcgccggccccgacgtcccctttgccggccccctcaggcgaagacattttctccgccgtcgcccttgccgagtcctcttccgcctcggcctccatctctatcctcatcgacctcatttcattgagcgtcgcgtatatcttcttttcgtccacaacgatttttcctataaatgaaaggaaaaaaccgctgtccagatgcgattccagcgtgtccagcaacttctgaaaccttgccagtttttctttcttcaatcccggcccgccttccctagtcgccttatcccgctctcacttctttgaatatctttccttcagcttcgcgtccaccatcggcgacacaagagaactcacgtccccgccgaaagacgccacttcctttattatcgaggagcttatgaaagaatgctccgtgctcgtcaccagaaacaccgtctcaacgttcggagccagtcttttgttcaccagcgccatctggaactccatctcgaagtccgtgaccgcgcgcagcccgcgcacaaccgctttcgctccgcacgccttcacataatccacaagcaacgtgtcgaaactctccaccttcacattggcgatgtccttcgtcagttccttcgctatttccatcctctcctgaatcgagaaaagatgttttttggacgggttgttggaaatcgcgacgataagctcgtcgaacaccgaggccgatcgctgcactatatccatgtgaccgttggtcatcgggtcgaaacttcccggatacgccgccatgttcatttttcgatgtccttaatgtttttccagaccgtcacccagcttgagccgtaccttctggagtcccgcattgaaagacttccgaactccccgcaaaccggtttcgctccgtgctgtccgacaatcctgccgccgtccgccagcatgtccgccagccccggcgattccatcgtcgcctcgaacatccccccgtcatacggcgggtcgaggaaaatcagatcgaaaattcccctcgccgcccctccggcgacgtattcccttgcgtccatccttataatttcaaccttgccctcaagcccgaatttactgacgttgcgctctaccagtcgtatcgctttcgacgagtgatccacaaacaccactctctccgctccccggcttaacgcctctattcccacactccccgctccggcgaacaggtccagaaaccttgctccgtccatcggcccggtcaggttgaatatgctctccctgactcggtcgtatgtgactcttatgctgtcgtctccatcctccgggccgaacagcttggatctcttcaaatcgccgccgattaccctcaaaactctctccggtcggttgcgcgcctaacccggatttttcgcaagaaaaacccggacttgacaagcgcgtctgcccgtcggacatccgcgcgaatccgtataatataacatatttatatattttatctagtatataaaagaactattatttttctgactctgccagtcaaagcacggttcctgcgcgcgcgcttgtaatctcatccttcataacggcaatttcgccgtttacaatcaccgcgtcgaacccgcacggatatctgacggggtcctcatacgtggaattatcccgaagcgcgtcagggtcgaacaccactatgtccgcaagataaccttcctttatcaatcccctgcgggcagccccgattttccttgcgggcatagacgtcatttttcttacggcctctcccatcggcatcagcttctctccaatgacataatgcttcaggaacctgaccgtcgtggagaacagccggggatgcgccttcgccccctcgtccgtctccaccccgtccgatcctatgctgctaagaggatgcgacatgatgaaccgcaggtcgtcttcggatatgaattcgcccgcgaccggggcgttgctgaaaccttcttttagaagcacatggagcgcggcggctttagcgcccttgcccgtgtccttcataacatccgccagcgtgcgcccctcgtactgcttcaattttttcagttcgaggaaaatcaccttttcctccatccccggctcgttcagcagcatcgtcgtggcgagtatgttggaaaacgccgtgaacggatagacatccgcctcgacgtccacgccgcgcgcgcgcgcctcctccatcatcttcatcgttttgcgcggcttgccccagtttcggctcaggattgccttgtgatgcgatatctgcagagacactcctgtttccatcgctatcccgattgcctcccggttcgcttcctcaagcttgtctatctcgtttctcacatgaacgctgaacagcgcgccgcgtttcgccgccgtcccgcagagagccttcacttcttctctcgacgaaaacatctgcatcggatacgccagcccggcggaaaaccctctcgcgccttcgtcaagcgacttatccagcaacgacttcattgcttctatctgccccgcgttcgcttttaacggcgaacgccccatcgtcatctgcctcaaattgccgaacccggtctgcagaaacacattcgctccgattccgatccttttgatatgttcgatatacccggcggtggaatcccattcaaactgacactctgttccaaacatgccggagaggtatcccctgaaatccctcctcagcctgtcgttcatcggcgctccggaaaaaccgcacgagcccacaaccgctgtcgtaaccccctgcctcagcttcgcctccattgagccgttcacggctatcttgaaatccgaatgcgcgtgcatatcaatgaagcccggacacaccatcttgcctgtggcgtcgatggatgaaagcgcgggatcatccgcgcgggccatggcgctcgcctcgtcgcccacagcctttatcgtatcgccttctatgtagacgtcgctcctgacgcccggcccgccgaccccgtcaaaaactgttccgcctttgatgtatatctttccttccatgcgctaatcccccgctatttcggacggcgtttccttcacttcgccgctacgccgttatatactatatccgattttatcgacactgcgcgcggagagataaaatgtcacaacaaaccgaaagagagcttgtttcgcggctcaataagaacatatccacaaaaaagaaatcccccggaaacagacgctgcgtcgtcggcttggacggattcatagacgagatagtccacgtggtggacacccgcaagaacaactccgaatacgagcggctcgaactgatgtccaactacgccgaaaggataaaaagctacgcgggcaagagcggcaacatagagtacgtgccgcagcgagtgaagatcggcggcaacggcccgattatggcgaacgccatcgcctctctcggtgtctcgacgacttatatcggaacgctcggcaggccggatatccatcctgtctttcgccccctgaaagacgccgcaaacgtaatatccatcgcagagccttgccatacggacgcggtggagttcctcgacggaaaaatcatggtgggaaagatggcccccgtatcagacgtcacttgggacaggattctggaggatgtcggaaaagagcgttttgtcagattgctgcaagaggcccacttgctcgctctcgtcaactggagcatgctcccgttcatgtccgacatctgggaaaatatcatcgcggaagtctgcccgaaactttccaaagccggcgaccgctttttcttcatcgaccttgccgacccccagaaacgggagttgtccgacattaaaaggatgttgagcatagttccgaagttttcaagttgctataaagtcatacttgggctgaacggacgcgaggctgggcagatagcgtccgcgctcggcgtctccgccgacgcttccgggccggacgccgccgcccgcgcctgcgaggaaatctcccgcgcgctcgacatctactccgtcgtggtgcatcccgtcgaattcgccgtcaccgtcgtcgacggcaaaacctaccatcaggacggcccacacacaaaacgccccgtaatcacaaccggagccggagaccatttcaacgcggctttctccctcgccctcgctctcggaaccgatccccaaacggccctcctcatgggcgtgtgctgctcaggctattacgtgatgacaggcgagactcccgacatggacaagctgttgtcgttcatgtccgactggcgggacgaccccttcggcaaaatgtgaagcgcgcctcttctgatgttgccaataatatacccgacatccgcccgtaggtggcgacccgccgggttgcccggatgtgcgataaaggaaaaaggcgacagcccaatcagcgggcaattcatgaattgcccctacagctaaaaccgcaattggcaacgtttgtcattaggctatacatgttattaaatgattccacccgctaccaagcgcgccatgcgcaaacttttttctttgcgcattatgctttttaccaaaatagttaatgggaaccttcattcaattcttcgtatatacgcgcaaacgcatttgtgacaatcagcatttattgccgccattcgcctcggatgcttttgatataataaaaaaggggcggcccgaaagccgccccttgcgtttcgcttgtgcttcttaaaatgtcagcccagcagcttcgagatcattccggctgctttcttcggattgagaagatcgcggcgggaagccattttgatcttctgctgtttctccctgtccgcgtacatttcgaacatctcttccttgtagtggaagacctgaatgtagttgacttccttgtaatcgctcgaaatatgagcgtccgggtagcgtttcttggcctcttcgacgcgctggagggcgagtttaacaatgtcctcgcgcttgccgaattcgagcgctccggtcgggcaagtggtgacgcacgccggctgcaggccgttcgtgatccggtcgaaacagagcgtgcacttaacgtacggcgctccgtctttttcctgtttcgggatgttgtagccgcaattcatcccttcgaccttagctgtccgctcattgtatatgacggcgcccgtgtcggtgatgacgacggctttgtcatccgtgccgtcggcgatcatcttgcaggccggctctatgcagtggcggcaggagtccttgaagaacgtccagatgattccgaggtctccgccttcctgttccttgaatctgaccacggtgcgggtctggtgagaaaggtcgggcgggttctggtgggttcctcggttgttcgtcttttccgcggcgtcctgattccagttcttgcaggctttctggcaaccgcggcaggcgatgcatttcgaagagtcaaaaagttttgcgtatgccattcccgatcaccccttcctttctatattcaccatgaacgccttggattcagggatcatggtgttagcgtcgcccacggtgggcgtgagcaggttcgcggtgtctccgccgttttcaggcgcgcaccagccgaagtgccatgtggttcctacctgatgaacggtctggcctttgattgtgaaaggtttgaatctcgatgtgaccatcgcgacgacgtcgatctggccgcgcgccgacttgattgtgaccatttcgccgttctttattcccttgagggcagccagctctttgctcatctcgacgaagttctgcggagccagttcgacaagctgcttgttccagcgggtcatgagtccggtctgccagtgctcgacaaccctgtacgtggagcaaacgaacggatagcgcggatcgcaggtcaaataaacgtccttgccctcgccctcgcccttttcgttgaacagcttgacggtcgggttgattctctgtccgctgaaagcgttgttctcgaccgggcattcgagcggttcgtagtgttccgggaacgggccttcggccagtccgggaccgaatatcttgcctactccttcccatgtcatgataaaaggcagtttgcctttttctttgtccgacatcgggggagccgcgttgtccgcgatgtctccgacccatttggctccgtcccacttgatgacgggcagttcggggcggcgcgggtttccgtcgaggtctaccgacgcgcggttgtatatgatgcggcggttcaacggccagcaccacgaccagttggagtaaagcccgatgcccgacgcgtcgttgttgtcccggcgcatcatcatgtttccggcttcgggataacttccgctgtacagccagttgccgcaggcggtcgagccgtcgtccttgaggccgacgaagttcgtaacctgcgtccccttttttaacacagcgccgtccgctccggccacgtcctgcgtgtaatagccgttaacctcgcgggctatcttgcgagagcttaggtgtccgttttcctcgtaatcccacgctagtccgagtatcggggccgggaatgctccgccttccgtcttgtatagctctttcaagcggtgaatgaggccgtcgataatctcggcgtccggcatcgcttctcccggaggattgacggctttgtagcgccactgcgcccaacgtccgctgttgctgatgctgccttctttttccaccgacgccgcgcagggaagcatgaacaccgcggtctttatcttgctcgggtccatccccgggcctttccagaactgtcccgtctcgttcgggaacagattcacgttcaccagccagtcgagttcgccgagagctttgcggacttttccggcgttcgcgctgctgcatgccgggttcatcccccacgcgaagaatccggagaatttgcccttgctcatctggtcgaacaggttaagccacgagtagttggctcccacatcgcccttcggcagccagccgtatccgaaatcgttttccttcgtcgctgattcgccgtagaatgccttaagcaggctgaccatgtacttcggggtgtggctccaccagttaaggctctgaggctccgccgtcgtcggcgtggtggccttcaggaagtccgccagcgtggcttgtgtgccgagtgggaacttcagatagccgggcagtatgtggaatagaagggcgaagtccgtcgagccttgcacgtttgactcgccgcgcagcgcgttcacgccgccgccggccactcccatgttgcccagcaacaactgaattatcgacatagtcctgatgttctgggttcccaccgtatgctgcgtccaacccatcgcgtacaggatggttccggacttcgcgggaccggatgtggaagtgtacgtcttatagacctttaaaagctcgtccttggtcgtgcccgtcacttccgccactttgtcgatgtcgtagcgggaataatgcttcttcagaagctgatatacgcagttcggatcctgcatcgagggatcctttattaccacgccgttggcgtctttctgatacgcccacgtcgccttgtcataattgcgtttttcagcgttgtatccggagaacagcccgtcctcgaacttgaagtccttgttgattaggaacgaagcgttcgtgtaattctggacatagaacttgtcgatcagatcgttgtccagaatatacttaatcatgccgcccaagaacggaatgtccgtcccggagcgaaggcgggcgtaaatatccgcctttgaagacgtcttggtgaaacgcgggtcgacgctgataagtttcccgcctttctccatcgccttcgtaacccatttgaatgaaatcggatggttttccgctgcgttgcttcccatcaccaacacgacatcgctgttgctgaaatcgatccagtgattggtcattgctcctcggccgaacgactctcccagagccgctacagtagccgagtgtcatatgcgggcttggtgttctatatacaccaagcccaaacctctgaggaatttttggtagatgtagcactcctcgttgtccagcgcggcgctccctacggacgcgattccttccgtgcggttcaccgtctctcctttggcgttcttctcggcaaaactcgcgtcgcggctcttctttatccgctttgcgatctcgtcgagcgcccagtcccacgacacttctttccattccttgccgtacggctcgcgatacaacggcttagtcactctgtcgttgttcaccgcgaggtgatacagcgacgcgcctttgctgcatagcgcgcctcggttgatcggagcatccgggtcgccttcggtgttgattatcttgccgtcaacagcgtgcaccaagatgctgcaactgaccgaacagtacgggcagatggtggttgttaccgtcgcgccttttgtgcgcaactctgcggcataggctcgggaactcttgaacccgaaaccgattccgctgagcgacagtccggctaccgtcgcgcccgaaactttcagaaacgttcttctggtcagcttcatgtgtgtgaactcacccctctcataggatttatttttaatcaaacaaatacacctttagcttacacagtttcttctcataaccacttcaaaatacccacgatgaaaagaggtgtcaatagaatgagaaattaatagaaatctatgtcagaaatgacatagattttcaaaataatcttttatctatttggatatttgcttatgctatatttaacatagcttcgacgtatagttcaccgagcgaacatcctaacaacgtctctccgggcgcgtccgccgatagcacgcaaccatcctctatcgtgccggggccggaaagtattctcgcctccggctccaccgccacaagcctgtctcctgccactccgtggacgattatcggctctttcgcgccgaccgggagcgtctccctcaattcgcagaactctatccttgtgatctctccggggtcggaatgaatgtgaacggcgtaatccctcgcgcctttttcgtccacaaagaaatgaacgaagttcaagtcccgctcccctgtcctgtccggcggcgcgcccccccctcctaattgtatatatataattccttctatttcttccctttgcgcgctgtgcttgtgcccgtaacaaacatactccacgcccgccttctggaacatccctatcatcctctcgacttccttttctctttcctccaacgttgtgttccttatgtacatcgggtcaagcatgcttcggtttccgtagaccgggaaatggaaaaaaacgaacctgtgctcggcgggccgcgcaagctgctcctcaagccactcccattgttcgtccggtttcggcccgtccatcctcaacgttgcgtcgttgtgtttctgcgcgttgtcgagcatcagaacctgcgtgtccccgtaattcaccgcgtaataaagattgcccatccgctccctgtacagcttggtcgacaggtagctgtcgtggttgccgattgtcgcaaacagcggagcttcgagtttcgccgtctcagtttcaaaaacgttccattgcgctggttcgtccacatccacgttgtcccccgcgtttaccacgaaaaccggtctgcgcaagttgacctgacggcgcacgcgcgcgaactgctccgtcgccccgtccgcccccagatgcgtgtcgctgaaagcgataaagttcagtcgctcgccgggcgccgggttgtatgcggtttccagaactgcgcctcccggccgcgaagcgttcgccctcagcgctacgattccatccgactcccggatctccgccgtctcgactccttttcccgaaaacgacagcctgcctgcccggacattcgccagttcgattctaaacgcgtccgtccccgccgctcccccctgaatcctgaaccccggctcgagcgatgtggcgcgcactcgggcgaaaccctctccgcgctgacgcacgaacgccccccgcgcggatatcctcagttcctcgctcgcgcgggcgccgccgaacggccatgccgccatccccgccgccacacccgctcccgctgcggccatccccttcaaaaaatcccgcctcgtcatttctttcataaagcgctcccatttttcgtcagaaaagcttccggttccgcgcgcacggcgcgacaaacaatgaacatctctttgactcgtttttcagcgaaattccatcttcagccgtcgctcgcagcttcttctattccggcgaatctgtttctcgttcgacaggctccggggaatccggtttgaaccttgctttgttgattacgaatataaaagtgtcgccctgaatgaaatagggatgaaacaagtccggattgtccgccgcccaatatgcttccaccggcgtttccactctcccgcgcgcaaactcgcgcgttaggaatagaacgtccacatcttcctttattaatacagcaagccatgcgtcgaaatcgggatatcccctgaagatgtgattgagccaaaccgattccgagggcggcttgtagccggggaacgagcggaggtctttttcatagtggtgaaaaacagcgccctgcctgccgtccacattcgcgtatatcaccctgtttttgagcctgtgtccgtatagtccgtacggcgaacagttgccggaatacgcgaccgtcaaagccgagtcgatggaattcagcgcccgccatcctgacgccagataatgagcgccgtaccaatcgtatctgaatctttccatgtggccggatttgtaagggagcgcgaaatacagagccgcggcggccatcatcgcggggacaatcgcgcgagcgggttttcgtcccgccggggcgaaaaacgccgccgcccccgcgagcgccgccatagcgaacagcgcaagcgccggagccgcgtttgagacccattccggcaacccggccccgccgaaaaacgcgtcccgcgcgaacgcgccgaaacgcgtcgcggcccctacgttgcccaacgccaacgcgcccgcgaccacccaccatcccctttcccacttccccttccacatcgcaatccctatccctatcgcggcaagcatcagacccggagccagaaacctcgcgttattctcgatgttgtaagggttcacatgccagaacaggagaaataccgccgggactagcgcgataaccaagcgaacatgcggcgcgcggcgggttttcaacgctgcggacatcagcgagaaaaacaggactcccgataccagcggaagcgcagaagccgccgaagccggcaaaaaaccggggtaacgcgcctgcgccgcaatcgcccccgctgccgccgcgaacgccaccgcgcgcgccgcagtcgccctgccgggagccgctttcagcgcccccgcaatcagcgccgcgccgaataaaaccgcagccgcgccgccgccgagcgcccgcccgaccactatcttcccgaacgcccccatgtccgacgcgggtatgtgcaggtatgaccggaacatcgccgccctctcgaatgccccctcgaatattttccatccgaatatgtccagccccatcgggtagaacgggctgcctgtcaatgaaaggttgcgcgcgtaccagaatatgcctgcggctgctgcggcggcgaaaaatgcgtccgctctggacagaacttttttccatgactcgccgcgcgcgcgcgccgccaccagcggaaccagtagcgccagcatcaccgccccgaaatacttcgagccgacagccagccccgccgctagacctgccatcagcatgtcgcctttcgcgcgcccgccgtccgaccgcgggatcaaaaacgcgactgcggccaagaaaaatgccgtaaaataaaggtctattccgaattgaagggtttgcgcaagaacaattgggactgcggaacccgccgccgccgccgtcgccgcgctcttcggcggcatccccgcccgcagccctattacgtgcgccgcaagcgccgcagtcagcagtcccgccgactccatcagcccgcacagcaggtcgtcgttcagaggcagcatcagccacagatacatcagttcgccgttccccggatagtaggtcgtcgcctgttccgggcttagcgtctgaacgaaaactatctttcccgcgtgcagccactccgccggaaataccagatggtccagaaaagcgtccgtgggggcaggcggcatggtcagcgcaaacgagcacatcatcaagaaaaggacggcggatatgattttcactgcggccatcgccgcgcccgccatcgcgtccggctccgaatgcggcgcttcgccaaaagaaagaacgtcaggggagtaaaccgcccgcgaagatttcgccttgacgcgcgccgccgcgacaacaaccgccagaatcacgatctgcgccgcgaacgcgttcgggtacttaatcgcgcccgccatagacaacaggagcagggtaaaagcgaccgtggagacaaaaacgacgcaggcggcaagcaaccgctcaggcccgcgtcgattccccgtcagcaaccccgacgccacccacgccgccgccgctgctggcagattcagcgcgaacagcctcgcgatgtcgctcagattttccattgttgaattataccaattatttcatccgaacaaacggttttttatatgacattgaacataaactgcggaattccgctatatttcgcttgctggcaaatatgcgcctctgaatctcttcatatctccctttttctttgtttattattccggcggcgctgttaattatttcgcggtttcgtgtaaaccctgaggaatttcggtaatatagtaatgagggacaaaataccggataacatgcggcaagggagttttccctcggaacggaggcggaggctatgaaaaagattgtggcggcggcgatgatagcggcggcgatgatagcggcgtcaacggtcgcgacctttgcggctgaaacatacaacttcggcgtttacatggggccggacgagcgggaccagcagcttaaaaccgttctcggcgcggtggtcaaatacgtcgccgacatcgagaaggtcgatatgcaactcaaatggtacgacgacgaaaaggccttcaccgacgacgccgcgaaaggcgttctcgatttcgcgttcacaaaaaataccgatccgttttttcttctggccactaaactcggctatgagccgatacttggcgtgtcgcttttcgacaagaaaaccgcccggatgtgcctctactcaagctcggacacgaaaatcacgggcatcgacaaaatgaaagacctgcgtctagccacctacaaggaacacgacggctactatccgctccgcaagatgttcggagacaaaattctcgatgggcttttcaaggaagtgaaattgaacagcaacggcatggcctcgctcgacatgcttgcaaaaaaagaggttgacctcgcccttgtgcacgagatgaacgtcttttccctcaagctgttcaaccccgccatgataagcaaactgaacgagcttgtttgctcggaagcgacagttcagccggggataatgaaacacaagaacgcccctaccctgctagtcaacaggctgtccagcgtgatggaaagcgcccacaagtccgaaaccctgaaaccctacagaagccttatgaaaacaacaaaaatacgctttttccccgttaccataaaagacttcgacccgctcatcaagctatacaccgacgcggcaaaaagcggctgggataaagactacaataaatggctggccgccgctaaaaaatagttcgccgatataaacgacttattatttgaaattactcatgaattgttgctgttttcgctcacgcacaaaaaaaacattttgtgcatggcacacaaacgagtgggtaaaatcaattaagaactggcataaacgcgttaaatgaaactgccgtattcatgcttgaacccggctttatttatagacccctgagaaccgggccatttttatagcggcacactgcttctcacgcacaaacgagcttgtgagcgccgcccatgtttgtttttctgtaggggcgcggtttccgcgccctatcatggcgttgttccgggcggggcaaccccgcctctactttgaataacgcgccttgcggtccgcatttcttccgctttgaacattcgctcccgaatcctaatgatggatccgggtttaaatgaaaactccaaatctgcacatggtattatttgtagcgcacataaataatcaaggaaagaagcgggattttcaattagtattccgacacagtcgccgaatttgcctttcattcccagagcggcgaaaagcgggcacaggcatcgctggggcgcgcgctgccagtccccgattttagcgtgtaaatgtttgccgggcgggtggaacatagcctgctttcgctcgcaggacataacaattccaacaagaacaatcccaccccctgccgacattccttttttactgtccgattaaatatttttcaaagacggcaatttgacgcgcaataatgtcacaggcaacgagtagaatgcatgacaaggttgtcgcattctaattgattgacaaaaagggactatgtatctgatataataaggcggctatatcacataacaggaggcaacgctatgtttaatttagtagatgaggaatggattcccgttctatggaacaacggacaagtaagcgccatcggcattaaggaagcgttcacgcgagccggaagcatacgccagatagccgcgagcaaccctatggaccgtttcgccatcatgagatttctattggccgtgctttattggtgcaaaggcaacccgacagaaggtgaaacaaaattgaaaggagattcatttcctgccgaatggtttgaaaaacttgaagcggaaaaagactgtttcaatctgctgggagaaggaaaaagattttttcaaaatcaatcagcgaataggaagaaatcaacaacggaattgctccaagaaatacctaccggcaacaattttcgacatttccgccattcgacagataatatcaacggattgtgcaaggcatgttgcgcaatggggctattgaggctccctctgttttccgtgtccggtctgcccgacctaaaagcaggcattaacgggactccgccaatctatatatttgccatcgggcctaatcttaaggaaaccctcgtttcaaattggatgcatgttgatagtataggcaatccctcatgggtcgcgccgtcgattactaataattctagctcttgcgcgcctttgcttgacggattgacgaccttatcaagaaaggtctttctgcacaatcccgatgacgaaatgtcagactgtataggatgtggcaaacgggactttttgataacaacatgtgaattccagagcgccggagaacttcgaaacgaattatgggatgatcctcatgttttgtacacagacaaagaacctcgcaaatcattaaaagctccggatcccacatcgactgggagattcagaatggatagaccgtggccggaaacggcatctcgaatatcccaatcaaacagattcattggcgcaaatacggacaatatgattctcgtgataggtttctccacagacaaagcgaaaaatatagatgtctgggaacgaacgataagaataccgtcaaaacctgcaagcacagatacggcggccacgcttatcgaattatggaaaaaagaaagttggctgatagaaaaacagcggatcggttcgagatctgataaagaaaattcatcaatggccgcaacgatacgtcctcatgttgagcatgtggtttcgtcgcgacttgacgaattgctaaccggcgaccctgccgcatgggacgacgcctcgcgcgagtaccgaccattaatgagcgcggttgccggagctttatccccggggtttacttcttcggctctcgaaagacgcagacaaatatcccgcgtcatccccgatatgcgtgaaaaaaaatccgccggaaaatcccgcgtgaagaaaggaggaaaaaaagatgagtgaaacgcagcgctttatcgacacgctgacgaaccttaaatccggcgagttaagcctgttgcgcgctcactcaggacaaaaacttgacgagtccgtccccgcatttgatttgttcacaggaatatggtggccgttaagacaacggagtcaacgcgcgccgcgccgcgaagtggcgtggctgatagcgaaactctacgcttttcgtcccgccgtttccaacgaacaaggaaagactctcgcgtctcaacttgggagttctatgccgcgcaatcagacttccgacgagtcaaaccgccttaggcaggctttcgacaacctgcttcttgcatcccttagcgacattgagccgagtttacaatgggctttagacagaatcgagtcaaaaaaactcaatctcgattgggttaagctgaccgacgatctttccatctgggaacgcgagtcaacccgcctgagatgggcggaagaatttctaaaccgaaaaggagaataacatgctaatcgaaatccacatgatacagaaccacagtccggccaacttgaacagagacgaccttggcgcgccgaaaacctgctatttcggcggagtcatccgctcgcgcatttccagccaatgcgtcaaacgaagcataaggatgagcgaggagttcaaatctctatgcggcggcgtccgcacaagacagttggcaaaactgatttcagaaagaatccaaggcaaggcagacgccaaaaagagagctgtcgcaatactcaaaaagtgcggcatcgctcctaaagacgaagaaaaaagcgatatgttggtctacaccacaaaagaagcgatctcgaaaatggcagacctgctggaaaacagttccggcaagtccgacgatgagcttgcatcggaattcggggggcttatttctgaattgaccgctgttcccgacatggccttgaatggaagaatgcttgaaaccggtgttcttaaagacacaacagtcgaggccgcgcttcaagtcgctcacgccatatcaacgcacgaagcccgtccggaagttgattattacgttgccgcagacgacattccgggagccgacgcgggcgccgggtatgttgatgaagctttgttctcgtccgcatgcttttacaaatatttctcaattgattttgaggctttagttaaaaacttgaaaggcaacaaagaactcgccgcacacaccgtaggagctttcatccgcgccgcggcgacagtcaatcccacaggaaaacaaaacagcttcgccgcgcataatcctccagacggcattttgattgaactcaaaaaatcgcccgttagttatgccaatgcattcgcaaggccggtctctatcagcggagggcgcgacatcgtttctcagagcgtcgctcaactcggacaatacatcctcgatctggacgccggctacggtaaaccggaaaaccgattctggttctctccgaacctgcggttcccgttgcagacgatagaggagaataaagaaatcgatctctcagataacaacgtcaaatcacttgacgaactgatccccgccatcgtctccgctatcggatatgactggagcaaagtaaaagaggttgttcttaattcagaggtggcatgatgggcgaaaacacgatgtttctccgtctagaagggccattgcaagcgtggggcggacatgagtccaagtttgtcgtccgcagaacctgcgaagcccccacgaagtccggcgtttccgggattatttgcgccgcgcttggcgttccgcgagcagaagcatcctcattctggttgccgaagcttcgctctttgcttatgggcgtcagaattgacagggccggaatccgctggtgggactaccacactgtgggcgcagaaatgcagatgagcattgcggaagccgagggcaagacaaagaaaggcgcgctgctcacgcgtcgagaatatctttgcgacgcttcttttttagtcgctttgcagggagattcagcagtgatcgatcagatcgaaaccgccgtaataaatccgaaatggacgctctatctgggaaggaagaactgcgttccatcgcggccattgagcgagcgccctccggaatcgcatcctgatctgatctcggcgttgtcatctgttccttggcgcagaaggaacaaggaagatgaagcgccgcagtcaatcgactgcctgattgactggacgcccacgcaagaacagccggaagcgccggatgacgcgttagtgtggcacgatgtccccatactgttcgagccgccatcccatcagcctcggtttgtgatgctgaaaaacctctcagttggaacagaaggagatgtcaggatagcggaagacgcggcgcaaagcagagttcccgatccgccacgttcccgcgcggactattcaaactccgcatacaagaacgcgcgggccgagcggctgaactccgaccacggactttgcgttttctgcaaatctcccgcgacaacagttcagcatgtgacatatcgccgcgctggcggcaatgaatctcaagaagatttgcgctctctttgccgactctgtcacgacgcagtcaccatgatagagtacggacacggaatggggcttgaccggataaaccccgaacaccctcaatggcgcgatgaaattatcaagaaacgagaagaagtagtccgataccggtctctcgaaacccgacggagacgcctgagcgcagaggaggtggaataatcgtcatgtttctttcttgccttttaatcaacaccggcgacaaccccgaccgaccgcgtccgggaagaatatggttgcgcaatctttacagagtccatcagcgcttgtgcatggcgttcccttcgtcttccgcatcgttagccgacccggattttcttttgccattcaagcctgacggcttcgcaaaaggccatgtgcatgtccctcgcaaacctgataccggttttctgttccgcgtcgaccctcttgcgggaaacggagccgcaatcatcgttcagtccgcatcaatgcccgattggcaatatgcgttccacaacgccgggtttcttctctccgccgaaccgcaagtaaaagccttcgagcctgtcttttcccttgatatgcaataccggttcaggctccttgcaaacccgactcgaaaaatctgcaccaagaccggcgaagacggcaaaagacgcaacggaaagcgtgtcccggtggcctcagataaacttgaagaatggctacattcgcgagccgaacgcgcgggtttttccgtcgttaaaaactctctgtccttaactccgtcttatgtctatgtgagcgcgcggaacgaaaaccttaaagggcaaaagcttcgttccgtccggtacgacggcgttattacaataacggacgcggatctattcaaagaggcagtgacaaacggcatcggcggcggcaaaggcttcggtttcggccttgtcagcctcgcccggatatgaccgccatgagggacttgcgtgaactgccgaaattcgaaaatagatggagccatcttttcctcgaacacggaaggctggacgaaaaggccggagccttgctatttcacgggaccgacgggtctatcgagattccgattaaccagctaggactgcttttgctaggccccggcacgaccgtcactcaatcggcaatgcgttttcttgccgacaacaacacgcttgtgtgctggacaggcgaacaaggcgtccgtctttacgcgcacagcacgggaggctctcactcctcaagacgcttgcttcgacaagcggggctttacgtcaacatggattcgcgcatcgccgtcattcgccggatgtacaacatgcgctttccggaaaaacttcccgactccgtttctctcgacaccgtaagaggaatggaagggcacagagtcagggaggcataccgcaagctcgcggaagagaacggcgtgatgtggcgcggcagaatatacaatccgcagaactgggatcaggccgacccgctcaaccgggcgctctcatccgctttcgcctgcctttacggcttgtgccacgctgcaatactttcggcgggatattctcctgccatcggattcattcataccggcaagatgctttccttcgtctatgacgtcgccgacctgtacaagatggaaatagcagttccgctcgcgtttcaaacttgctctgaaagcgatgtcgatgtcgagcgcaatgtaagattggcttgtcgggacgtttttcataaaacaaagctgatgaaacgcgtcttgccggatatcgcggaggtattagatgctggtgatgatattggagaaatccccggcgagcttgaggggagacttgtcacgctggatgatagagccgcgaccgggactctaccttggcaatccgagcgcgaggattagagatattctgtggaacaaagccgtcaagaaaatacgcgacggcggcgtcactcagatatggagcgacacccgctctccgcaaggatatctttaccgctcctgtgggaaaccggcccggccaatgatcgatgtcgatggacttgcccttgttctttctccttacaaaactgaaaggactgacgagactttgatcaatcaaaataataaggagtcttcacaagatgattgatttgacaatactactaaaagtgttttaaaaaaaccggcatacaatatgctggtgtcttccccacgcgtgtgggggtgaaccgccgactgagaacgacggcgaccgaggcgcgccgtcttccccacgcgtgtgggggtgaaccgggggcgatatgaaatccactaaacaggccacagtcttccccacgcgtgtgggggtgaaccgtttgtcaactggaaccagatgtacagctataagtcttccccacgcgtgtgggggtgaaccgtcttcatgctttgatcctttcggtatgtttgtgtcttccccacgcgtgtgggggtgaaccgatactcgaatacccgaatcctgtatctgcgccggtcttccccacgcgtgtgggggtgaaccgtgtttcccatgttgtctataaaattgagagccgtcttccccacgcgtgtgggggtgaaccgggggtgaaatgatgagcgttttttcgcagaaagtcttccccacgcgtgtgggggtgaaccgacgaagctatgcagttgcctaaaatcctgaacgtcttccccacgcgtgtgggggtgaaccggtaaatgccccacgtgcggcgaaccgatgtacgtcttccccacgcgtgtgggggtgaaccgtaaactctaatccgtcgccgctatctgtggcagtcttccccacgcgtgtgggggtgaaccgccatcgttgtcttccaccaggccgcttacgtagtcttccccacgcgtgtgggggtgaaccgcgggtggcgacgcttacggcttcttctttagcgtcttccccacgcgtgtgggggtgaaccgcagcctttgacagatggaatgcccgccgttgggtcttccccacgcgtgtgggggtgaaccgagaagcccatgacacaaacccaactattgatagtcttccccacgcgtgtgggggtgaaccgatggaagaaacaacatctcaaaaacttgcaaagtcttccccacgcgtgtgggggtgaaccgcgggggtcggctgacggggtcggggatggcagtcttccccacgcgtgtgggggtgaaccgcggcgagcagtttgagttgcgaccgccgacgcgtcttccccacgcgtgtgggggtgaaccggagggcgattgaaatggcagaaagcaccgcaggtcttccccacgcgtgtgggggtgaaccgcccggaagctaacaaaggaaatcaacaaacaagtcttccccacgcgtgtgggggtgaaccgccgttgaagataaattgttcccatatgtctgcgtcttccccacgcgtgtgggggtgaaccgtggatcagcacttgattgaccgtgagcggatcgtcttccccacgcgtgtgggggtgaaccgaatcctagagatcatgccgtcgccgccaatatgtcttccccacgcgtgtgggggtgaaccggcttgagcgtggtcgagggcgcgattgccgctgtcttccccacgcgtgtgggggtgaaccggctaatagaattaatagaattaacgtccggaatttcggcgtccggaacaaaattgccgttattctgttttattattgattgtgaaacaaatccatcacggcgaggtttgagatattgtgaacgattccaaagacctgtttgaaaaagttaaacatctattgctcggccagtactttgctgttctttcatcggtacagagggacggcagtccgtattcaaacataatcggttttgcggctacggacgatctcaaacatcttgtttttgcgacgccccgaaacacgaggaaattcgacaatctgctcggagagccgcgcgtttcgcttctggttgacaacaggagcaacagcaaaggcgacgttcatgacgccgcagccgtaaccattctcggagcggtcagggaaatcgaccgcgtcaatgatagcatttactttgagctatacgcggaaaggcatcctcatttagtggatttcttaagggcggacgataccgccgtcatagcggtgagcgttaatgagtactgctatgttagcaagttccagagcgttatgacgttgagcatgaaataaggagacaggccgcaatgaaaatatggaagtttatgaaaagaatcgggacgaccgcggcgacgctggcggcgcttgactccgtctggctgggcgtcattatgagcgactattataaagaacatctcggagaactggccagaagaaacgacgccgggctgacccccgactggaccgccgtgatattggtttacgttgcgctgacggcaggcctgaacatattcgcggtggatacggagtccggcagcgggcgcataaagaattctctcgtcaggggcgcgttattcggattaatcagttatggcatttacgaccttacgaacatggccacgctcaaggggtggtcttgggaaatgacggtggcggacatgctttgggggacattcctgtgttccgtggcaagcgccgcgacggccgccgccgccgcaaagtgagcgtcaaatgaaactgaaccaaatcgttatcatcggagtcgttctcctgttgtcgttcgccggggggcagttcacgtcgtccggcatggactggtaccggactatacaactgccgacatggacaccgccgggttccgtcataggcatagtgtggacgacgatatacatactgacggcggtatcggcgattatagcttggagagttttcgctggggattcccgattctatcttgtggccggactgttcatgatgaacgcggcgttcaacctcgcatggagctacattttttttgcccggcgcatgataggcccggcggttatagattcgatggcgattgaaatcacgctgcttgcgctcattccggttctgtggaagaaatcgcgcgcggcgtcggttctactcctgccatacgcgctgtgggtcgggttcgcgacatatctcaattactgcatctacgcgttgaacaagacgtgaaacaggagacgcccgcaagatgaaaacgatgtttgcgcggataacttgtctgagcctgattatcgccgcttcctccgttatttcggttgcgctcgcttcggattcaggatatgtcgcaacgggcgcaaaggcgaagaatttcaaactgaacgaccagcacatgcagttggtggaactggacaagctgcgcggatcgacggttgtcataatctacaccggcagaaacggattcgacgacgcggctgaaatcatcaagaaactcgacaagaaacatagcgggcgggaagacgggaaaaaagccggcaaggatatccgcatagtcggcgcggcgaacttaaagggcgttcccgctttcgtgaagaagatggtgaaaaaccgcatgaaagagccgcgttatccttcgttcctcatggactggaaaggcgagatagcggcaacctacggttatgatgaaaaagggattgccgcgttcgtagtggatggaaaaggcatagtgcggttttcaggcaatatcaaaaacgccgacgatgacatctctaaagtatccgcagctatcgactcgatatagaatccacccctgagttcatagtagaaacaacggcggagcggcgaaaagcaggcacaggcatcgctgaggcgcgcgctgccagtcccctttttcgctcagagttcacagtagaaacatcgaatgtttattgaacacaaacagacattacgcaaacgataatcaatccccccgccggcattcctctttttgtgccttcattctttatcttttgtttcttaattcattctttcttgccgtcattccttttctcttgtgccgtcattcccgcgaaagcgggaatccattttcacccgcccggatgctatttcgcctatcagcgacattgtaaactgtcaaaagcctcggccttaccatagatgctcccgtttttaaaattgctaatttcaaacctgaccacttcttcttcgcttcttctcgcatttgctatttgtgttgagtcaggcagtcaacagctttgggattgtttgttctgcgcaatactttgattatgtattcctgtatttcttggttgtctgcttcgtcaagaagtttgcacaagagcataattgcagcgtcttttccatattcgccaaggtttcgtatacaagagttctgaaaatcgctgtggtctctgtgaatagattcattgctgggggggttcggcatttttcctctggacaaatctattctttctctgtcacgagtaatatcgttaaagtaactctgtttttcttctccactcgcgatcctttccatcacaaacaatgctttgtcctcataaccccatcttagaagacacccggcagctacgcctctaactctaatgtcattgtcatttatggcgtttgatatcacagcttgagatttgacatccaacctacataattcattggtagcattcattcgcaattctggacttatgtcagatttaattatgtcttcaagcaaggggacgatacgtgggtctcgagaatttgctatgtctactaaaacaagtcccttcgcaaactcggaagtaagatgatttttgtattgatatatttttagcggtagttcacagcaaaacgttcttctatcgtattcatatatcaaccgctgatgctttttttgctcttcttcatccatatcatcgaagtctttccggggatcaatatatgatggtttccgcgaagaccaaacagggcaccactcgtcagctctgaaagaatcagatggattatccagaaacttatttaaaacttcctctcccatctttatctcttcatccggacacgctttcaaacccgtgaaatcatctgcggatgcgctgacaaaagcaatcaatgtccacaccaagcagcacagtatcatcagcaaaaccgcatatggtggagtcaggcggagcctgtttacagaattagagttgatctggttggctgatcttgattttgtataagcacggctgttgtagggatagttgttcggtcgcggatgtgtggtctgtcgcagcttcatggcggttatgttgccattatgaacgaaggagaacgatttggcaacggggggtgggaggttgtgtgttgtggagggcggatggggtggcttaaggagtgggatgctaggaataaattcccggaaaggcaaagcggcaatgaattgccgcactccaaagttccacattaattttggctgatccttaggcataggcagaaacgagtttggggggcgcgcccggagggacaagagcgaagcaggtgtgggcgctaaagctcaaggatgtcggggcgggacaggcgggcgccttggaaatcaacttcgagttcgggccattcgcctgtgcgggtgatgaattcggcgcggtcggcaaacgcgattatggtgtcttctgatttcgtgcctgtaatggaggggttccatgcgaaagcgcaattgggtttgacctcgccgggggtgtcggggctggcgcagaagtatcttgacttgtagccgcacgggccgccctgatggtgaaggagccattcgtggtcgaagccttcgctggagtaaacggcggtggcgtcgcggaaaacggaggaaatcttcgcgccgggtcgggtgagcaagttgaaagccgcatcgacgcggcagcaggcggcgtgtctgcggcggaggtcgtccccggcggggccgaagctgaccatccgagtggcggaagccacaagcccgccccttctggcgcagaggacaagcattgcggctcgctcaaggggctgccgcgtcggcagaggatgcctgtatgccgggagcctgcctccggaagctacgaggacgacgatcggctgcgcgtcccgcgtccagcactcggaggcgagcgcggcggcggcggcgttctcggtcatgcccggacgcaaagccctcgcggcggactcgagcgcggccccggcgtccgctccgagcgccctgaacctgtccatctcgctttccgtcaactccatcatcaggtcggagaaatcctcgcccgccgggacgaagccggaggccggcatgtccgccgccgccacgcccgcccccgcgcacatccgcgctatcttcgcgttcctgtcgtcggcccatggaatctcgacaagctccacgtccagcccgacgagttcctcgtctctgattcttgcggactcgattcggttggtcacgaccgcgcatcggtctggaagcagaacaaaggaggcgacgcccgcttcggcggccatgttcacgtggcaactggctccgcaagcggcccacgcaaagttgtccgaccgcgatagcgccagcgcgccccagccccgctctttcattctctcccgcatcctgtctatctttatgccgaattcttccgctctggtcattgttccggccctcaggttattgtttgtcgcgacgccgccgcgattcggatattatatcagttcttaatcggttttgccgattgagagcgcccgcaacggagttgtggacgccacccgtgatgacagggttgcggatagcgagcgcgctgatagctaattttatttaatcgctgatataatgattcgaggcggttgcggtggggacgccgcgaaacttgcgcggattcgcgtattgaaccggagaatgcggggcgcgaacgccgaggagcgaagtatgttaataggaattatatccgacactcacgacaaccttgaccggttaagagcggcgatatcgacgctgaaatcccgcggcgccgcgcggcttatccactgcggcgacatcgtttccccgttcgttgtgaaagctatcgcggaagccgggttcgaggagtgtttcggagtgttcggaaacaacgacggagaattgatttatctttccgaaacatttaagaagatagggcggatagagaagccgccggctttcatagagatgggcggagcgcgttttgccgtgcttcacgagcctatgccggacgacgcgatggcggcgctgccggtggacgccgtgctgttcgggcacacgcatcagcctgttctcaaggacggcaaacccgtgatagtgaatcccggagagtgttgcggatggctgacaggcaaatcgactatcgccgtttttgacacggcggggatgaaggcagagctaatcgagctgtaggcgcgaaagccgcgaggaggccgcaagccttcggaggaaacagatgaaagttaaaatggcgataatagcggcggttctggcggcggcggtctgcgctccggcgtcggcggttcttccggacgcgcgcgggccaaacgcctctgtagcaggcgaaaactccgcgacgatgaaagaaattttcaggataaaggtggagaacgcggcgggcggagcggtggaagtgagcgaagacggaggcgcttcgtggacggccgccggaaaagtcctgctggccgccgggacgataaatccgcgagcgtacaccgccagcggctgggcgtcttcgggggctgtcgctgcgaccgccgtaaacgccattcacataaaagtgcggcagaacgaagacagaggcgcggtgttcagcatcctgcccaaagatttcttctctccgccggcggattataaatctttctattcccggaacagttcaataataacgaatatcccggctggagggagcattttcggaggagccgaatcgccgttcataggctcgcgggttctcgcggcccgcgccggttccgctcactccccaatcgccgaggattatacgccgtcagaaggcgattccctgctgataatcgtcgaacagccggagaaatatccatcggaaatcgtcttcgaaaacaggttcggagggttcatccttataaagtatcccggagaggaaccgaaactcatcgggcaggtgttgaaaccggtggcgggggttggaaggttcgaaggctcgctgtacacggacgtcgggagaatcagggcgaaccacacgggagtcatctgcgtctcgacgtcgccggtgggagagataggcggttttcagataatccctgaaaaccacgcgatgagcgcggagatggagaacgcgaggctgctgacgcagtggatggtggtcgggccgccgggggcggcggacccgtcgctcgaaggggtggctccgctgttcaggcatttcatcaggccggtacatttcaaaagcgggccgcagggaaaaacgcttgaacaggctttgggggcgttcatagttcaggcgcggatcggcggcggggagtggacgcggatgccgtcggtgtccgggcgggacgacaaagctctgaaagacgtcacgcacatacgcatgctgttcccggtcgaatggaaacattagccgggctatcgcctatgcggggcggccgggctttgcgggttgcgggcgcggggtatacaccggggcgcaaatgcgtataattgagactaggcaaggaaagcgggacgattaaggatgtcggaattaagacgcgaccccgtgttgggtcgatgggtgataatatcctccgagcgcggcgacaggccgagcgatttcatcgcagcgaaacctcttccgaaaacgggcttctgcccgttctgtccggggaacgaagacaagacgccgcctgagatagacgcggtgcgggactcgtgcacggagccgaacaagcccggctggcgcgtgcgcgtggtgtcgaacaagtatcccgcgctctcaatcgagggcgacctcaacaagcgggcgcgcggcatctacgacatcatgaacggcatcggcgcgcacgaggtcttcatcgagacgcccgaccacgacaaaaccatatccaccctagaaccgcaaaacatggaacagctaatgtggatgtacagggaaaggatgatagacctcgagaacgacgaacggttcaaatacatactgatattccggaacgcgggtcagtccgccggggcgtcgctggctcatcctcactcccagctcatcgccacgcctaccgtccccaagagaataaccgaggagcttaacggcgctcaggaatacttcgacttcaaagaccgctgcgtcttctgcgacatgatagacgaagagagggactaccagagaagggtcatcagcgagaacgaccgatttattagtttcgcgccgttcgcgtcccggttcccgttcgagatgtggcttgtgccgaaacatcacgaccccaatttcgcggacttggaagactccgacatcgcgtctctggcgcagtgttttcagaagtcgctcaaatatctggacaaggcgctggacttcccgccgtacaactacatcatccacaccatccccgtgaacaccagccgacagtacacgtaccactggcacatagagataatcccgcgcctgaccaacatagcgggattcgagtggggcaccgggttctacatcaatccggttccgcccgaacaggcggtggagattctgcgctcggcgaacggagacacgcaatgagcgggggcgaactgagccacatagacgaaaaaggccgagcgtcgatggtggacgtgtcggaaaaggaacgtaccgcgcggcgcgcaaccgtccggggcgaagtgcggctcaggcccgacgtgatagacaaaatactgtccggcggaatctccaagggagacgtgttccaagtcgcccgcgtcgccgccgtgtgcgccgcgaaaaaaacatccgaccttatccccctgtgccatcctctcagcctgacgaaagtttccgtcgagttcagcgccgacagagacgctggaataatcgttatcgacgcggaagccaaagcgatggacagaacgggggtggagatggaagcgctaaccgccgcgaccgtggccgccctcactatctacgacatgtgcaaagccgtccagaaagacatctccatcggccctttccgccttatggaaaaagaaggcggcaagagcggcccttataaaaacgaagcttgaacccgaacttgaagaaaaatatttgccggaagaaatcagattaaaaaactgtcgatggttgaccgcgtccggaggcgttcagaatgaaggcaaaaacaatcgcgttggctatagttgcggcggcgtttatggcgggcagtccccgcgcgctcgcggacggaggctccccctcccccgcttcgctgagggttctcaccgcaaacgtcggcaacgcggacatactgaactgcggcccgaaatatttttacaaactgtgtctcgtggaatgggagaagaaggtcgcggaagggatagccaagctgtcgcccgacatagtgtcgctgcaggaagttctggacgttcagtggtgcgaggcggcggccgtggagaaaaacaagaagaatgtgtgcttccggtttgaggacaggaaagagaggcatcaggttcgcaggctgttgggagatgattatacgatagtgtgcgacgggcgcgccaactacgagtgcataggagtgaaaaaaagcgtcgggacgattgaaggttgcgggcgcggagaactgtgccgcgctccgggctggccgctgacaatcgaaacgccggaaggatgctcgacaaagacggtcgtgttcggggcggacgcggagattaatgggaaacggctgaggatagtcaacgggcatccgtcggcggcggacgccggatgccgcgccgaagagttgagaaggttgttcgagggatacgaagggttcccggcgcttgcggccacggacagtcctgcgattatcatgggcgacatgaatatggacccgtttcaatgggacgccgcaaaagacgacgtggcggtttggctgaagcatgttggggatggcaagaaatattactatctgagcggtcctgcggaaaacgacccgccgttcaggacatgctccgggttcacgctggaccacgtgataacgaacgcggcgcgcggctcttgcgtcacgctggggcagtcgcccgggacggaacggctggacgggcatccgaagggggctccgattcaggaagcgcccgaccatttcgctattctttgcgaaatatccctgcctgacggggattgacggcgcggcggcaatcggtttggagcgggatagacgccgttctagggccgatttaaataaagttgcaaaaatatatctcaataacaataataatgcctgttggcggagtgtcgcggaacgaactgcgacgcgcccgtcaaaattcatcaggggagtgccgcgatggataaggaaaaagaaaaagaattagtaaagtcgtatctttaccttaacgccgtccttcctcagcttgaggagataatcgcgtatgacgcggaggcgcgcgagctgacgaaaggctggaactgcacgatccagatgcacgtgcccggcggggcgggagtcaggttcgtcttcaaagacggcaaatgcgaggcgaaactgggcgctgtgagcatgcccacaatctcgctgaggattccgacgccggaagccgccaacaaaatgatagagaacaccggcacggtcattcccatgatatggggcttctggaacatcgggaaactcggaaagttcatgaagctgacgaaactcatggagaagtatctgagaccgtcggaagaagatctcaaaaacaaggacttcttcgagttccatacgcgcgtgaaactcatgatggccgtctatggcatgaaggccgtcggagagcacgacacgtatgtaaaaggaatagtgtcgaaagtgccgaacgggccgatggagataaaggtgctgccggacgggccggtggcgcatatcgtgctggacaacggaaagttcgctgtggccaaagggccggcggcgaacccgatggtcgtcatggaaattaaagacatcaagctggcgtacgatatgctgaacgccaatgtagagttcatggaagagctgggcctgtgccgcataaggctgcgcgggcacgtcggaatggctgaaagcctcgcggtcgttatggagcgcatcggcctgtatatcagttgacgccggacgactatacccaactggagggcttgaaaatggaaacttacaaatttgataaatcatacgagtggttcgagcgggcatgcaaagtcattccgggcggagtgatagggcacaaacaccccgcgttcaccgtccccggctcgtatccgtatttcgcgactcgcggcgagggaagccactactgggacccggacggaaacgagtacatcgactggatgtgcggtttcgggccgatggtgctgggatacaacaacccggtggtggacgcggcggcgcaggaacaggcaaaactgggcgacggcatgagccatccggggccgatcagcatcgagtacgccgagatgatggttaaactcaccaagggcatggactggtgcgtgtacggaaagaacggcgcggacatcaccacatggtgcatgaggctggcgcgcgaatacacggggagaaagaaaatcctgatcgcgcgcggcgcgtatcacggcgctcaggcatggtccaccccaagctacggcggcatcatcgacgaggatcgcacgcacgttcacttcttcgaatggaacaacctagactccttcatggaactgatcaacacatacaaagggcaggtcgcgggcgtgatgatgacgccgtaccaccactgcatatacgcggaccagcagatgcccgctcccggctggtgggaagccatcggcaaagtctgcaaacaggaagaattgattctgatatcggacgacgtgcgcgccgggttcaggctcgacatggctggcagccacgcctacttcggatacgagccggatctggtctgctactccaaagccatagccaacacctacccgatctccgccggtctgggaacgaacaaactgaaagagaccgccgaacacgttctgttcacgggaacgttcttcagcagcatggttccgatggcggcgtccatcgccaccgtgaaagagatgcagaggctggacggagtaaactacatgatgaaaatcggcaaggcgctctgcgacggccttgtcagcgtaggcaaatcccacgggtttgagattatcatgtccggaccgtacgacataccgttcatgcggttcgcgcgcgagaagaacttcatgctcaaacagctcttcagcggcgaggccgccatccggggcgtcatcttccacccgcaccacaactggttcacctcctgcgcgcacacggaagaagacatcaagaaatcgctcgaagtggccgacatcgctttcaagaaagtcaaagacaaatacggaagcgactgaagcgcgacaaacggatagacgcagtaaatccgcctttaaaagcgcctccggcggccaaagagaaacttttgaaaaagtttctctttggaatctcttcaaaacttttcacatgagcgcggcggagcgatggcgcgaacgcgcccgctccgccgcgcgcatagaaatgttttgagggaaaacttttttaaaagttttcccttaaccgcattaaagcgcctccggcggttcaaggaaactttgaaaagtttccttgaaaatccttcaaacttttccttgcgcgtcggtacgggacgctgacgcgtcccgtaccgacgctcctgtggaaatgtttaagaagaagattcctcatgaaacccctttctcaatatcttttcgcatgatacgcgccgatgggaagagcgaagccttcccatcggcgctagcgcgaaaagttttgaaagggtttaagggaatactttttcaacgttccgtcattagtaatacgtatcatatacgaagaactaaatgaaagctcccatttactatttggtaaaaagcatcatgcgcaaaagaaatagttttgcgcatggcacaactcttagcgagtatattctgctataatattagaagtaaaacacgaaaagcttaactctgtttttcacattagaacaactgcgacaggagcgcggctgaaactttgtaagctcgccataatacgcttgttcatgtgttaacaacgattcgcgcgcgcaacgtttaatgatttggagcaaggcaatgaaagaatcaggaatactgcttgggttttatgtggaccgaaaagaagctaatgtggcgtttaggatgttgcgacgccgtcattttcgcagaaccgcgataatttcaaaaaccgcctccggcgtggttcgcaaaaacgccgcggaggatagatattggacatgcgtaggagcggtcgcaggcgtcgcgattggaataataattgcgcatctgtcttttggaacattcgaggcgatagtggcatggcgatgcgtagtcggactattgcttgcggctgccggcggggcgattgtcgcaaggctggcggtttatgtctttcagtcgagcgaggatcgcgattttacgaagaagcgatcccgatggcttgtgaatgaagaaacggccgtcatcgtgaaagctccgttggagtcgctggatcaagctttggcgcaaatgcgcgtcgccggagagacgcaaccctcgatttttgtttttcaccatgaccgggtcacagaggcggaatctggatctgacaagaatgaacacatgacagcctcgcagttggctgtgcacgcgagactgctagccggatatcatcgcgttcagtcatatatgggcgtcaagccccatcttcttgagcttgtggatgtttgtgttaaggagatagacctttgccgccgtgaactcgccggggcgtcgcgtctcgaacagcgcgtttccccttcagcggaatggattcttgacaactatcatctaatcaaagccaattacgacgatgtgcgacgcaacctgcccggaaatttttatcgagaactgcctatgctggccgctgagcaggttcagaacatgccgaggatttactgcatagcgtcggaccttgtatcgcatactgacggccaactggatcgtcacaccatattgaaccatcttaacgaatatcaagcggtcagtcctttgaagatgggcgagttgtgggcgatgccgcttatgcttcgcatcgcgcttatctcattcataagaaacctaaccaatcagatgacagtgtggctgagagagcgcgagaacgccgacttctgggccaatcgacttctggtcgccgcgcggctcgcccccgacagtcttttttttcttctgtccgaactggagcgagaacagcctgagcctagcgaccacttcgcgtttcacctcaccggacatctcttcggggagagcgaggttctcgcgcacgttaagagttggtttgagcgcaagagcggcggcgtcttggccgacagcgcgattcgcgagcaggcgcgacaggccgcgcataacgcttccatcggcagcgcgatagccagtttgcgccaactgtctcttattgattggcgggatgttttcgaagacttgtgcgtggttgagaaaaaactttgcgaggacccgtctggggtgtactgcagcatggattttgccacaaaggacagatatcgccatgcggtcgaggaactggctcgcggcggcggcgtttccgagcaagaggcggcggaggcggcggttctgatggccgacgcggaagacaagccgcttgatccccgaaaaaaccatgtcggatactatctgatcgacgagggccgtccgcgtctggcctcccaactggcaagccgggaaaccctgcggcggcgaattcttcattgggtctatcgcaaccacacggtcatatatatttcatccattctgcttccgacggtcgcggcggtcgccgccgttgcggcggtcagctctttcgcgggagggagcgcggcgctaaccgcgcttgcgtcggctctctcatctctgcctgccagccagatagccgttcaggcgatcaactaccttgtgacgcgttttttgccgcctcgccttctgccgaagatgtcgttcgaaaaggagggcatccccgacgaattccgcacgcttgtcgttgtgcctatgatgctctcaaacatcggcacggcgcgcagggagatcgaaaagctagagatacgctatctagccaatccggaaccaaatctcctgttcagcctgttcagcgacttcaccggctccgacaccgagcgcgacagcggagacgccgaactccttgcggccgccgtcgatggaatcaacgcgttgaacgaacgccacggcgcggggcgttttcttttgtttcaccgcgaacgcgtgtggacggagtcggagcagtcctttatcggatgggaacgcaagcggggaaagcttgagattctaaacaggttgctgaacggcgaagcgcttcccgacggacagcagatcgtccgcgcgggcgaccctgacttgctgaagaacgcgcgcttcgtcatcacgctcgacagcgacactcaactgctaagagacacggcgcgacgaatggtggagacaatcgcccacccgttgaaccgcccgccgttcaaccccgcggacgccgtcggctccagcccgtacactatcattcagcctcgcgtcagctcaagtcttcccagcgcgacggcgaccgccttcagccgcttgttcacagaccccatcggaaccgacccgtacacgaaagcggtttctgacgtttaccaagacctctccggcgaagggtcgtatatcggcaagggcatctacgatccgcgagcgtttcaccatgtcttgaagaaccgttttccgttgcagaggattctcagccacgacctgatagaaggggcgcatcttcgcgtcggctttgtcagcgatatagaactgctcgacgaatttcccggcgactatttttcctatgtcaaaagagagcatcgctggactagaggcgattggcagattgcggactggtgcatgccgaaagcgccctcccctgacggcaaacgcgttgcaaatccgctcagcgctctgaatcgatggaagatttttgacaaccttcgccgaagcgttgcgccggcggcgtccgtgttgtttctcgcttcgtcatggctgatatcttcgggaatgggcgctgcggcaagcttaatagttgggttatcggccttcttcccggtgttttcggagcttgtcacgcgagcgaccggcaagcgcggggcggaccccctgtcatggcgacaactagcgcacaacgcgaaacgttgctgcgcggaactgcttttcctgccgcacagggcagctatgtccatagacgcgataattcgcgtgttctaccgtcgtttcgtaagccatcgcggactgcttgaatgggcgaccgcgcaggcggttcaacagaaagcgtccgaacggcttcgcccgcttctggctcaactgtgcgccgtcagcctgttctctgttgtcttaggaatcgcgatatttctgtcgcgcccggataatctctcgatctctttgccttttcttttgctgtgggcggcttgtcctatagcagggatgcgtctgagcgcgccgcgccgcatcgcgcgcgcgcgccctatcgcccgcgaagatgaaatcatgctcagagtcacagctcggcgctcgtggcgctatttcgaagacttcgtaggcccggaaacatcttggttgcctcctgacaactttcaggtttacgccggaaacaatcttgccatgcgcacaagccccaccaacatcgggttgggcctgctcggcaatctgggcgctctcgatttcggctacctgacctgcgacgaggcgttcgagcggacggcgaagtgcatgaaaaccatagcccgactcgaaaaatacaacggacaccttctcaactggcacgacatcaagacgctcgaccctctcgaacccagatatgtgtcgactgttgacagcggaaatctgcttggcagcctgtggacgctcagcgcgggctttcaggaaatcatcgacgaacccgtcatcgggccgcaggcgttccacggccttctcgacacgctccgcgcgctgcgcgaggcgcttgagaaaagcgacagagcgagagttcataacgaggcgttgaaatttctcgaacaacaactggccgagcctccgaaacgactgtgcgaactcgcgactcggcttttatccttgacaggcgctgtcgcagagttgcgccgggccgtgtgcgaaaacgccgcgccacgcgatgaggccgcgcactgggcgaaccggactgaaacaatgcttgcgtcatggcgcacgctgatagaccgctatctcccgtggatggaagcgattgcggaagagacgaaaaccgccggcgacgagacaagaaacggcgcgattgcggactgtcttgaggctctggaaaaagcgccctccatgcgacagctctccgagggaaattttttactgtcgaagacggcggcaaatgatgaaaacaatttgaacgaaccgcgacgattggaatgcggacagcgagtcgaagacgcttttgcccgcgccaaatggatggccgccgaaatgctcgaccgggtcggcagcctgttgaactccgtcaacgagttgtcagaaagcatgaacatgcgcttcctgtacgataacgagcgacggctcttctctataggatttaatgtgagcgagcaacggcttgactcgtcgcgctacgatttattggcgagcgaggcgcggataggaagccttgtggcgatcgcgcgcggagatgtgccgggcaagcactggctggcaatggcccgtccgtacggctccgcgggggggccgccagttttgctaagttggacaggcacgatgtttgaatacctgatgcctcttctcttccagaagtcttttgaaaattcgctcttggaccacgcatgtcgggaagcggtgcgcctgcaaatcgcttatgcccgccggagaggcgctccgtggggcgtttcggaatcggcgcacagcgccgtggacgcgaatagaacatatcagtatcaggcgttcggcattccggcgctgggactgaagcgcaacttgggagaaaattttgtagtggccccttacgcatccatgctcgcgctggccgtctcgcctcttgaagccatccgcaacctcaagcgtcttgcgcgcatgggaatgtcaggcgactacgggttctatgagtctattgatttcacccgcgaacgaagccgcgaaggcgagcgcggcgtaattgtcgaagtttatatggcgcaccatcaagcgatgagttttctggctatcgacaacctcgtcaacaacagcgcgattcgacggaggtttcaccgcgacccgagagtgcgggcgagcgagccgcttttctatgagcgctctccggcggctccgcctatctaccaaggctcagaccgggagcagacttctttccatgccgcgccggacgaaatcgctccgtcaacaagcgttttcaacacgcctcattccccacaccctaaaacgcagatgctttcgaatggcaactactctctaatggtcacaagcgccggaggcggctatagccgatggcgagacttcgacatcactcgctggcgggccgacacaactagcgacaattggggtttcttctgctatatccgcgaccttaagagcaagcgggtttggagttcagctttccatccggcgggcggcgacattgagaactattcagttagcttcaagcttgatcaggcggagattcgccgctcggacgatggaattgaaacggaaactctcataatcgcggcgcctgaagacgacgtggaaattcgccgcataacactcattaacaggtcaggccgcaagagagagcttgaggcgaccacctacattgagcttgccctcgctccgcacgactctgacaggcagcacccggcgttcagcaagcttttcgcgcagactgaaacggagcctcggttcggcgctctcatagccacgcgccgcgtaaaaaatcccgacgagccgaggatatgggccgcgcatttgatttgtatgccggagcaggacgagcccgccgacgagctggagttcgaaatggatcgcaatcgcttcataggtcgcggtcgctccttgtcggaccctgcggctctcggcaataaattgtccagcgtcgcggactcgtccatggacccgattttcagcttgcggcgaaagataacgctcgaaccgggagcgcgccgcgatttctccctcattctctgcgccgctgaaactcgcgaacaggtcgttttgctcgctgaaaaatacttcgaccccaattcggcgtcccgcgaactagacatctcatggagccattcccagcttgagcttcgccacctgcgcattaacccagacgacgcgcgtcgattccagaaactcgccggctcgatgatatatcccaactcccggctccgtccatggagcgacctgctgaaacagaacaaacttgggcagtctcgcctatggccttatggaatatccggcgaccttccaatcgccgttgtagttattaaacaggacgcggacatcgacttggcgcgccaagcgctgcaggcccacagctattggcggctgcgcggcctcaaggcggacctccttatcataaacgaggaatccgcgggatatgaacagcctctgaacgaacaactgaagcggcttgtcttcagccattcgatgaacacgggcgtggacgtgcggggcggcgttttcctaaggacagcaagtcagattcccccggaagacatcaaccttatgttggcggcgtctcatgtgtcgctcgtcgccgcgcgcgggcctctggcccaacaactcagcattcccgccgagaccctcagaacgctccccccgctcgccgttaaagccatcaaggaagagccctccgcgcaactcccgttcatcgaactgccgtacttcaacggactgggcggcttcacttcagacggcagggaatacgccatcttcctcggccccgaacaacagacgcccgccccatgggtgaacgtaatcgccaacccctctttcggaactcttgtcagcgagtccggctcaggcttcacatggcgcggaaacagccagcagaacaggcttaccggatggtctaacgacccggtttgcgaccctccttcggaagtcgtttacattcgagacgaagacacgggcgcagtctggacgccgactcctctgccgattcgcgaacgcgacgcttaccgctcaagacacggcgcgggctacagcgtctttgagcacaacagccacgcgatagaacaggagcttacgatgtttgtgccggtcaacgacgacggcggggaccccgtctgcgcgcgcaggcttaagctccgcaacgactcgtcccgcgcaaggcggctgtccgtgactttctacgtggaatggacgttgggcgagcatcgagagaatatgcaggcgcatgtcgtcgccgagtatgaccgcggctcaaaaatgatattggcgcgcaatcgctaccgcgcggattacagcgaaggagtcgccttcgccgcgacaatccctgcggcgagcgcgcacacaggcgaccgcgcggaattcataggacggaacggaagcctgtccgcgcccgcggcgctcaagcgagccggattgtccggaagagctggcgccggatttgatccttgcgccgcgcttcaggtgaaaattgagcttgcgcccggcgaaagaggcgaaatcatctgtctgctcggcgaagccgacaacgcgaccgaggcggccgctctggttaataaatatcgcgacggcggctccgtcgcgaaagcgcttgagcaaaccgccgcgtggtgggacaaaacgcttggcgccgtcagcgtcaacacgccatctcattcggtaaacctgttgctcaaccgctggctcctctatcaaaccataagctgccggctgtggggcagatcgggtttctatcagtcgggaggagccttcggattcagagatcagcttcaggatgtcatgtccctgctgtacgccgctcccaagcttgctagggaacatctgcttcgcgccgcaggccggcagttcagagagggagacgttcaacactggtggcacccgcagagcggggcgggcgtcaggacgcgatgctccgacgacctgctgtggctgccgcacgcgacggcgcagtatgtgcgcatcacaggggacgcggaaatactcaaagaaaacatcagattcattgatggccggacgcttgacgaggaagaatacgaagcctttgggaatccggttgagtcgatcgagagcgccacgctgtatgaacattgccgtttggcgattgagcgcggctcgacatccggcccgcgagggcttcctctcatcgggactggagattggaacgacggcatgaatcgcgtcggaataaatggcaaaggcgaaagcgtgtggctcgcatggttccttgtggacgcgctcaaacagttcgccgcgctcacggagatggttaaagacgcgccggttgcggcggagcgataccttgagagagcgaagcgtcttgcgaaggccgtcgagaaacatgcctgggacggcgactggtataagcgcgcgtggttcgacgacggctctcccatcggctcatcgaagaatgaggaagcgatgattgattcgctgccgcagtcgtgggccgcgctgagcggcgcggctgaccctgcgcgcgccctgcgcgcgctcgaatccgccgcagagcgcctcgcgctcaaagacgagaatatggttctgctgtttacccctcctttcgacgccgggccgaaggaccccggatatatcaaggcgtatccgccgggagtcagggaaaacggcgggcaatacactcacgcggcggtgtggctcgccatggcgtttgccagaatcggcgacggaaaccgcgccgcctctatcctcaaaatgttgaacccgatagaacacgctcgcgaaccggaagcggtcgcccgttatgctgtcgaaccttatgttgtcgcggctgatgtctaccgacttcccggtagaacaggacgaggcggttggacgtggtacactggcgccgccggctggatgtaccgggcatggatagaggatgtgctgggaataaaaatcgccgccggcaaactgctctttgatccggttcttccatcagaatgggacagagcaagcgtcataatccggcatgaagaagccgtttatgaaattgaaatcgagaaccccgacggagttaaccgaggcgtcgcatgggtggagatggacggccaacgtctgaagaacacagagattcatctcgatggagaattggtcaaacaccgggtgcgcgttcggatgggggtttcaactcagtgaaaccagcgcgctttgaacatggctttgaagtgattgctaaaagaatcaaatgacgaatttgggagcgatgcgctgagcggatagttcgcgaggcgcgagcctcatttttgaaatagggacgcggtttcctcgccctgtaaaggcgatatttcggcgcccctgcttcaattattcagagagaccgaggcagagcgccgctgtgataattgcccgcgtttcgccttctctatctgcgaatccgagttcatttggccagcgtctcggagattgttttcaacaaaacttcgccgatgaatggtttctgaacaaacgcgcgcgctccgtcgttcattaatcgcatggctttccctgcgacgctgaatcctgaacacaggatgactttgacgtcattccgtatttgccgcaaagccgcaaacgtttcggctccgtccattctcggcatcatcatgtcgagaatcaccagtctgacatcggcttgattcttcttgaacaaatcgagagcctctttgcctccgttggcggcgattgaactgtatccttgctcaataagaaaatccgacatcatatctgtgaagtctttttcatcgtccacgataagtattgtttcttttttgcccttccgcaatgtttcgtccgcttccggcttgtaggccgttggcgcttccttcgcgcatggcagatacaccttcactttcgttccttcgcccggtttgctttccacctctatcagtccgttgtgcgtctcaactatgctcttggtcaccgacagccccagccccgtgcccgcgcccttgtcttttgtggtgaaaaacggctcgaatatttgttcgagcatatccgccggaatcccgccgccttcgtctcgtatgtcgataagacaatattctccgggtttaatccctctgcgagaactgcaaaattcattgtccagataaacaggagccgccccaatctctagtttgccaccctccttcatcgcgtcgcacgcgtttgcgcaaatgttgagaaaagcctgtccgagttgatttgcgtccccgcgaatcaggatatcgcattccggcgtcgttatttcgatattgttgaggacgctgacacgcaatatgtccactgtgtcaatcaggatatcgcgagccgaagcgtcgcttatttccagtttttcctttcttgcgaacgtaaggagtcggcttgttatgtttttcgcccgcattgcggacttaattatgcgtcgcatgcgagcttggttcgggtcttccggcgacatcgagcctaaaacgacttccgatgttccgataataacagcgaggatgttgttaaagtcatgagatatgccccctgcaagccggcctaccgcgtccatcttttgagactgtatcagttgttcttgcgcgcgcaaaagctcttcggtccgttcctctatgacttcttcgaggcattcccggtattgtttaagctcatgctccacgcgcttgcgctcagagatgtcgcggatgttgcactggatcgcataggcttcgctctcaagatatacgttgctgacgaactcaacgtctactgtttcgtatgtgaccgagttcgagtcgatgattcaacgccgtagatcgccctttattcgttttttcggatttttttaatgaaaaatccgggatagatggaagtcgcaagcctagttcaaagcgttctcagaataacgctcttcacgcatttgttccgacaggcgctcttttgctctgtgaattcttgatttgactgtgccggtcggaatcttcatggctgatgatatttctgaatatgtgtatccgttgaaatgaaacattgaaaacaccagcctgtacatctcaggcaacgaataataacgcctcattatctcttcatttatatggttgtgaaaaaacaccgtgtcaggcgagtccatgtgcgatattcgtcgcgcaactttcaatgccaatttgcttttgtcgtgttttctatcgtcaaaagagatttcttgctctttccttctttttactttgttgatatgcgtgttaatcatgattctgctggtccatgcccggaaattcgtgtcaggcgcaaaaccgccgtaaccttcgcaagctttgagaagcgtttcctgcagcaggtcttccgcgtcttccgcattgcttgctatctgcaaggcgcgagaccacagatatgtcttttctttatcaataagtttttccacgtcttcgcggaatgcttccgtcatagtcgctctcctgttcatgccggaaacgctttttaggcgcgggcctcgacatcgttttcatgcgcaaagactcagaatgtattctgcccgtcgcgttgcgcgccattgctcaacattaggctgagatcgcttttattttgcggcggcgacattgcgctgagccagttgcagataaaagaaagcgtgttcgttgtcgggacgtattcgaagagcttcgcgccattcaggaatcgagtccgcgaagcgcccctgttcgaacagtatgcgagccgtccatagatgcgcggccgcaaaatcctcgcttgcggtcatcgcctctctgaacatgtcaagagctccggatatgtcgccaccctgatatcgggcaatgccgctccggtgcgccacatacgcgttgcctccgttctctctatagttcgcggcgtctttccgcatcatcagaagaacttcgtcttccggagcctctttgatccctttatccagaatagccagcgcctcgtcgtacatgccttcattctggtaaatagtggcgagccagacgtacgcgtccgccagtttcggatcaagcaataatgatttctcgagttcttcaaccgccatccagtaatacccgcctgttatatatgtgtttgctccaagccagcggcggcaatctgcggcgcgcttttttacatcttctatcctccagccttcggggtacatcgttatgtaataatcccaccactgagccgctttgccccaccatttcgcgccctcgtacgcccgggccgcttttgttataacgttcccgtctctcggattgctttgcaaatgcgtttcatagtgcgcgatggcggcgcggtaattttcgctcgccatcgccctgtctcctttttccaccgatgcctcagcaaccgcgcttgccagcaatgaaaacgcaagaatcgtcgcggcaacgatgttgcgtcccgccgcgcctcggcttgaaccctttgcgcaacacaagcatctcagaatgttcattgcttctatcttcttgtaatgtttcattatattcctccgcgcttttctgtaataacagcgctatttgcacaaatgcgctttttaacaagtcgtctcttgttcgagcaaaacgcattagctcagcctctttctaattccttgcgtctagcgatgtcggttaagcttcagtctcttgctttttcgtgtgaatcaggtccgccaccgcatcgccggattcatccatcgcctttttcatgctcttggtaatatcgcgcgccgtgtcggcgacatcctcttttcgagcagcgatcttgtctatggctttttcaacgttgtccgacattttatccatagccttgtcaacgcgctcgcctagcgttcccttgtcgctcttgcttttatcgacaacgttgtcgatgtgttcgccgatcgttttcttttcattcatgttttgtttctcctttgtatttgtttgctgcgtcaatgatacgtcgctcgcttaacaatcgctatcggctaaaaagcatatgtttgtaaccatcgcggtttatatatttagccacatcgactaacggatgaacacgaagctgacttgatgacggattgcgccggacactaatgctcgctctgccgtcaagaggcgacaaccgccgccgcaaggctgtctcaggcaacaagattgaacaggaaaacattatttattttagtttgaagcgcaggcttcgcggagacgaggcgtttcgggcgcgttcgcgttcagataatccgttagagacaacaatttaagcattcgcatcacattcgcctgcaagcattgcaattcgaatgagccgctccatctgtcagtaagcgttcttaattgcgccaaaagccccgcgccggcgcagtcaagaaaagtcactcccgccatgtcaaacgaaagggacactccctgacgcatatactcgaacacaaggtctttaagtctttggcatacatcgtaagccagttcaccctcggctaatatcaatgtggtttcattctcattaactatatcgcaactaaacattgtttcgcatgtcctttcaaaacacagtagcctccagttaaacgattcttcgccccttaatgactctcaccaatacaactacgactgcgatgacaagcagaatgtgaatgaagcttcccatcgtatatccgctaactatccccagcaaccacaaaattgcgagtattaatgcaatcgactccagcatgagcaatcccccggtatcaatcgtttctgacgccgcgcgcgccgcgcttagtcaaagcgtcatccggttgaaaacatcattctgtgacagattatgatcgtaacaataaggcgttataacgccttgcaaacagtcataaacaacgtcgaattcgcatggcttttctatatacctgtttgcgcccgctaaaaatgccctcaacctctcatgcatccctgtctttgccgtatgaatgattatcggcatgtatttcgattggtcgttcatttttatcttgcgacagacttcgattccgttcatgtcaggcagcataatatcgagcaaaaccacgttaggttttttttcggtcgcgaaggttacggctgtttcgccgcttcccacatcgaaaaccgcgaaatcatctttcgctaaaaataactctcgcagtttctgtcgataaagcttatcggcgtccgctatcaatattattcttgatgccacggcaaagcctccttttcgcgcttgttttgtttgcgctcaacattaaagggacactgtccgcgcgctttaatgaattaaacagttgagaccttgccgcaatccaagaagttcaaagcgaggccgagcgtcgctttccatgtttcagcgtgagtaacgccgccggcctgctcgtgacatgcccttggagatgacattagattatgcgcgcgtgagccgcttaatcagagcgcgcgcatagccgcgcggaacaacgcgccgtcatttcttcgatttaactaggtctgaaatagcgtcgccggtgtcttccacggctcttttaacgcttttggaaatttctcttccaactttagagacgtctttttttgccgattcaagtttatctttcgtcttgtcgactttgtctgaagccttatccaccgccttgtcaacgcgttccccgattgtctttttgtcgctcataatcttttctccttttgtttttgaatattattctcaggctcaagttaattgcgcctgattgcattcatctatgtcgcagactgaatgagagccgcacattcgtctgttatcctcaatccatcgagggtctggcgaacaacttccaagagcggttctatgtccgacgatttggtcacccatgctttcgcaagatacgccctgaaatctttgcgaaacagcggatatgcggtgttcactatcaccgtcctgccgcctgcgcacaaatcggagagcgcctcaagcccgctcatctccggcatcccgatgtctagaaccactatgtccggctgccattcgcgcgctcgctctatcgccgacgctccgttatccaccacctccactgcgtatccctctgtttcgaattcctcgcggtagagttcggccacgcttgtgttgtcttccgctatcaacaaccttgtcataggcttccccctcagccgcgcaatttcaacttgcgccgcttgtcatcctttgtcattcatgtacttcttggtttttcgttctttcttattgaaatactgtttgaacttgttgatttgtttctttactcccgtcaattcctttggtttctgttctgactgctttttcttggcggccgccgctgaggcgtccttcttctttttatcagaagcggatttggctttagctttgttggcgtctctctgcttctcgatgtccgcccctatcgctttgaagcctttattctgcttgcgcatttccattattttctctgccgggtagttataatgtcctgacataaaccttaaatttactagatttacgatgtcgtcatcggcgagttttatcttgttccaatctttttgcggcttgtttttataatacccgtaggcctttccataaggaggccctgccgccgcgccctctctgagcggcacatgatacgattccgccccgaacccgtatcggtttgatatttgttgccacgtttggccttttagccgatagtctgagacgatcttaggagccacattggctttccgcgaaataaaaaacacaaccggaatatcttcttccgcgatgtttcgttgcctgacattcgcaacttccgtcttcggaacggcaaaatactcgcttatcgaattcataaaactgtcggaggcggcgtccgcggctctgttgaccgcgctccccgctaacgattcgcacatggtctcttttgtcgcgacagtcatcgcgaacaaaaccaatatcagcgccaaaattaatatccttctcatctttacacccctcgttttagaaatattccgttgcatacatcatattgctctcaagcgggttgcgctatcggcaaaaaagcaatctttattagctcatgcggcatatatttgtaactgttttagctaaactcagatgaagctgcgccgcgcaataaatagcgtttgtggctgcgccggaacttatatgctcgccacatttagcgcttcattaagagacagcttatcaaagggagccttaacgcgtttggacatgtttcttatttcaaaggagccattccaagactcagccaacttcttcatgcttaacaaaagcccaacgccggcgctgtcgaggaatgacacttttctcatgttgaacaacaagcgcatgcccggactcatacagcttgtgacaatctctccgaattcatcgcacacatcgtatcccagttctccttcagggcaaaccatgatgtattcatattcattgaatattcgatacgtaaacattgtctcccccttttcttcgcccgcgcgatgcttttctctgactaatgcgcacattcgcttttttcttagaacctatcagagttgaccgcatgttatgagtcgagtcattattgaaggcttttgcgttgcgcggcgcatataaaactccgcgcttttcttatttcggcaatattggcgcattgtttaagctgttggatatctttctttttgcgaaatgcttctttattaatggagcttgcgagccttttgcgtccttgctcataatttgtcgaatttcattgtcaggcatagcaggcaatctatttccagagtctgccttaatttcgaaatacggttgcgcatgttgtcggaatatagatactttcacatcggcgtctgatttgccagcttctaggttatgtgtgttatcgttattcttgctggttttctcgccgctttttgacactttatcaatttcttgttcgacaagctttatgttatctactttttctgtcatgacaatcgtctcctttgagatgcttcgtttatatgctatttgccgataaaaacacgatattcgcgactttgacgtctttattaatcataaacagcaatactttaggcgctatcggcgcgagagcatttactattaactattaagtcttttatttatagctttttcgtctattgcgacatgaataaacatgcaaaacaactttcgcgtcaattcttacgacacaaacgcaatccttcttgttgcggagattgcagatcgcagttgtaagacgacaaataaaaaagccctctataaaagagggttatttgcacatggtcccaaggaggacctattcgccgttttaatttgagcgcctcgtgccgataaagcggatatatgactacagattctttctataactgatgcccacgcttatatcttccacgctcagaatgccgaaatgcaatttggcggattcggacagatcgtatctcatgccgaaattgaagtggtctccgtcatactcttccatgaaagtggtttttttcagggccttcatgaacggcgatttctttgatataaggaatcttgcttcgagtccgtagaacagggagtcgtcgatgtcggaggttctgtatcctacttgatatctcagcgcaattttgtcgatccgatgttttgaacggagctttttaccggaagtaaagttcttgctgaccaccgcgtatttagttctgtttgtggaggcgaggtctaacaatcccgcgcttacagcaggatgctcttgcgcttcaggaacaaaattccatttaaggttcaaagagccttcctgttgaactttttcaacgaatgtcacgcctgcttcaaagcgacgaggtagcccgacgttggctttcacataatccttccatccaaccacgtcaacgctgacgtcgtaatcccacggggcgagcacatacgcgctgggattctttacaagccctgtcggccctgcgatagacggaccgttcggtatcatctcgccgtcaatatatggatcggccatcgtatattcatgcgtttttgaaccgtcttccgcatagcacaatgcggacgccgccagcgttaatgtcgcacaacagaccgcgagaaacatgtaatcttttatcagtcgcatcaactatcccccatgttcgccaatgtttttcatccttaataaatatatagttggggaaatatacgcgctatcggcaaaaaggcattatttcataaccaatgtggcattattttgtagccttttaggctaacgagcggaatgagcaaaattgcgctcaaacaacactttaatatttgctcacatgaaagatagttcggcgtcgcttttttggtgttgcgcgtcgctgctttcgaaaagtatcttcatctcgccgtcggcgctaatcattatcgggatgccgccgtagcggcgcgcggattgggcggctatggtgcgcgctccgagatagcttccgagatcgggatgctgttttatcatagcgcctacggctatcaactcatcgccgtcaaatatcacagccccgtcaagaccggcgatttcaagaaacagatttttcctgctcgtcaaccgcgcgttcatgccgaggcggatatctcgtattaccggggagagcatagcgcgcgccgtgtcgggcgtgggcgcgattcctcctattatcgactgtttattaaccacgtgttcgataactttatggtcaggatcgtacactagcaaagctccgtgacgcatgtaactgaggtcaaacatcagctcgaaaagatttcttccgacgttgatgtcgcccataatgtcgcacacgctgtttttgaacgtttgggcgtcatacacgcgccatcgtcccttcctattcgcggcaagaagtccgcgcgagtccattatgaagatgtctccacgctgtcgcagatgaactgagaattctccgcttttcaggattgaggcgaatggctcaagaaactcgggaataaacttcggctcaaaagactcgctgacatccttccacaagatttcctgatagtctaaaaacctcagttctctgtccacgcgaaaatagacttgcatgctcgacgcaagaggatctacaatcttttgaatcgaagcgtcagacagcgacaacgcgccctctccctccccgatcacgatgttagtcatcacccgattgttctcgtaggttctgaacctgacatcctcgatgtatgcgataaacttgttccagttaacgcccgcgtcgaatatctcaagccatcgcaccgcgatatcctcttcgacctgttgcagtgagcgtggggtcggcacgactggcatccttgctctccagatatcgagattgttctgaatatatgatattagcgatctcaaattcggggttaacggattgtgagagcaaaatacgactgtgtgagcgcccattgtcaattcgaacgcatgattcgcatgctcgcttgaataccagtgcgggaccgtcgagacagcggccttcattatgatgcgttcataagatagcatttttcaatatccaatgttaaatgaatctctgaagaatgcgacctgccggagtttgcgcgataatgtgatgtctaatcattcaagactttgtatatgattgttatatcgcggataaccggcacagcttttttcatgaaaaattccttcaatgtggcttttcgcttaggaacgttgatgacatcgccgggacgcagcgacgggatgtcccccgtcgtccggttcagattccccgcctcgattatctcaggtcgttcagggtagtttcgcgttatcgtcaccccgctgtcggcggcgttcgccgcaaacccgcctgagcgcgttatgatgtctagaatcgtctgcccctcgacataaggataaattccgggagtgttgatatatcccgtcacagttatggactctttcttcgcgggctttacaagcacgacatcgttaggaagaagctcgaatccgtccggaggatttctgactgaaaccgaactcatctcgccttgtcgtatcaatgtcacttccgatgagaatatctgcgcgtcaagggccttcgccgcggctagaagtccgattaagttggctgcgttttccggaatcgggtagaaacccggctccggaacatctcccagcacctacactgaagtcgttccatgatatgaaacataaatggcgtcgccgtctatgagttgaaaagtttccgcgctcggcggcgatatcgagcctcgtttcagcgccaccggcatggacacgccgcttctgacgacgaatactttgcgttcatccattctaggatgcgcgagccgcgcctgcgcgaggagtttgtacatcatatacgggtctgtgagttcgtaaggccccggcgctgtgatttcgccaaggatataaacttgcggcttgtgaaacctcgtcacaagcaacgaaaccttcgggtcttttatgcgcgcggcaatcgtctgttccagttccgcgcgtatttgctccgttgtctttccgagcgcgtacatgtcttctatcagcggaaacgatatcatgccgtcgggcctgccggtcactgtttttaaaaggtcttcattgccgtaaaccgatatctccatctcgtcattcatgtgtatccggtaaacatccatcaccggattctcgccgattgcgccggctcgcgcgagcgtatacgccgccagcacggctgttgccgttaggctagccaacaacataatgcgcgagcgattcattgtcataacctccagaatttctagttgcggactgcggcctgcgcgccgagcggcgccacagtcgcggcgaactatacttgtgatgacaaccctctaaggtctgcgacttgcttgcgaagactgcggttttccgcgcgggcgtccgctctcggtccgagaaatataaaatattcaaccgcgactccgagaataccactgccaataatcagcagaggcagtttcacgctcatagtcgccaccagaagatttatcgtggtgtcggtattgttgacaagcgcgagaatgacgctgattgtcaaaacaaccgtgccgagcatgaaccagatgttttcccagaaacgtctgcgttgcggcgtcgcctcaagcttagcctcggctatggcgttttccgcgtcttgcgcttgctttatgtcgttttttcctgtcatgcgttctccttttttgcggacgcggagcttatccctcaatgtccacaacgactccttcctccgccgcaagcgaattaatgattttattcaggtcttccccggtcacgtccagaaacggaatgtcttctgtttgcttgataacaatcccttttttctcgccgataagctgtatgcgaaatccgctgttctttgcccacactctgacagagaaaggctgtttgcgctcgatcatgctttcattgaacttcgacactgcgtccagcgccgtgttccagagcgctgattttggccgggctggcagcggcaagcctgtattgcgatacagaaaactgtcgccgtcggcggcgattccggttttgcgccccactttttttcccactacgcgcgagaccgggctgacggtcgaagtctgatcgattctatctacgctgtcgattgaatcagagccgagcgtgcgggtgaactgatctcccataggattctccttttttcgaacgtcaagcggccggtctcgatcaaggcccgcggctgctattgtttaagtagaagccccgcagttgtagcttccgtcttttcgccgactgtcacggcttcgttcttagcgcttgctttaggcggccgaaaaacgaaatcgtctctcgaacatgccgccatgtgcatcagggccgcgccttcgctcagtatgattccgccggatttcacggaagcgaagaaaccggctccttcgcctttgcccccggtcgatttaatcggattgattttaatcagttttatctttgcgaacgcgtcttgcgcaagcgtcagttcgggcggtcgccgtctatcctgttcctcgtctaggacgaccctcgtcaacaccgcttccatcgcgtaagatttaagcagattcggaaagatatccgcaaacacgccgtgattgtaaaataaatcaagataccaccatgtgcggtcgatgaaaacaacccagccgacctgcgcctccgtaaactctatgcgcgagacgtactcatcgtgaaggatatccctctccgcgtatagcgcgcagatatcgtagttttcggtctttatagacgaccgctcaaaaaggccttcgatatgcttccataccatattttgatccaccctcgacgcgccttctttgatcatcgtcggaaacgacttctcaaggcgctctcgccggaggctcgccggagcgaaatccgagcggtaaaaagcggggtcggtcgccgttattctcgaagctcccccagagagcgcctcgcattcccagcggctcgcctcgacgctgacagcgggtaaaacaacgctttcacccggtcgaataaccgcgctcgccgtcagcattctgttagccgctcctccgatcaggattgccccgtccagcgccagcgcgggcgtgtcgccgctgttctctatgcttaccgaattcattttgcctgtttccatcgcttttatgccgtcgccgagttctcccgcgcctatgacggtgaaaagctctttcgcctcgaaggcgggcgaaaccaacgtcagagggaatacggcaagtcctccgtattccctcatgtcttgcactttgaggtagtccatgaatattgaaggcgtcggcatgattttctccttcagcccgagtttcgcgttgccgttcagtctttttctgaagcgtctttttttgcggcaaaccgctctttagcattgccgacagcggcggctgttttatcgtgcgcatgcgagaccatgctttttgcttcgccgcaaacgtcgcagaccttgtcagacacatcgtcccattattccctgatggcggcagtagtttctttgccgcttgcaggcgctagaagaagcgccgctccggcccccgctatcgctcccgctccgaagcctatcaaagcgcgccacacattagtcctcttctgcgcgttaatatcgttctgtttggatgttcatttcttttctccctttttgatttctaaagcacatgcctataatgaatatttctatcattattctaaattgttcaaccatagcatcctcctgatatcccgccgcgcagagcatatttgttattgcgcaacaaataccttgccgaaagaaacacgacgacaattcgtcccatgaagatgtatgtcaacacattaatgatacgattgattggaatccgggagtatcggcaaaaaagcaatctttattaactattacggcattcatttatagccattccggctaataaacgccgcgcccctctgagccgtaaatgtggttcgaaaaaaggcgttgatattttcaaatgtcagatcgggcgccactcacaaccttgtgcttgagcatcgttaatattcagggattgttaaaaaacttgacactttattcccggaacggcgaaaagcggggacaggcagccgcaaaagacgcgttgcctgtccccgtttttcgctcgaatactcagccagtgaaaaggcacaatttggagtgcggcgatggttctgggtgccaccctgcatacttgagtgaatggcagcaagttggtatcagtcataagaaacgcgtgatttggaatgcgcgattcatcgcctgtttcctgatgaaagcgacatttcgagcggggcaaccccgcccatacataggaataaatgcggcgccaacgaagcagttcgcctatgtgataaagcgttccgactcgccagttcttcagcgaatccttttattgcaatcgagcgattaatacagacgcgcgcgcgcgcctgatattatgatttttcgattagtcctttattaatggcgaaaaacgtcatgtccgaatcttttttcatgtcaagcttccccatgatgcgatacttgaaggttttcaccgtgctgtaggacacgtcaagttcgtcggcgacttcgctcattgtcattccgcgcgccatcctgatgaatatctgatactctctctttgaaagctgggaaagcaggtcgccttctttgtcatggtcgttttgattcgttacggctccatttgaagccgagaaatagatgtctcccgccgcgatttttcttatggccgcgcatagttccatggctgagattttcttgcacaaatagccggccgctccgctcttaataaaacttattgcaaactcttttctgtcgtatatcgtaagaattagaatttttgtgttcagtttcaactcgacgatctgttttgtggcttccagtccgtcaacaaccggcatttcgtaatccagcacaaccacatcgggtttcagctcgccgcacttctgaacagcctcgcgcccgtccgaggcttctccgacaatctccatgtctttttctccgtcaatcagcctgcacaatccggcgcgcaccactccgtggtcgtccgcaaccaaaactcttatcatctttttagcccctccaacgggcttgtgaaccttaattgtttctaccgccgcgtttgcgggttttgatttcttttttgcttttttgccgggcatatcgcttcctccctctttttcctctcatatcggaccgccaatctctttcttcacattgaaaggaatagccacttttatgtgtgttcctcttccgggcgcggaacatatttcaaaccgcccccccatcatgttcgcccgctccctcattccaaggatgccgaaattgtatctgccctgctcgctgtcttcttcaattccgcaaccgctgtccttcacctgaagaacgatttcagaatcagtttccttcaaagatatcaacgcggttttggagcctgaatggcggacaatattcgccagagcctcttgaagtatcctgtacagattgatggcgttgtcaggactgacgcgagactcgtcgacgggcgttatcctagattctatgaagatatcgctggcgttttccaaatccgcaatcaatgttttcatagcggcgttaaaccccattctatccataatcaaagggcgaagaccgagacatatctgttgaagttcttccgacgcttctatcgtctgcttaatcaaattattgtaaacactcacatccgagcatgcgcattcgcggttcctcagccattcgatctcaagttgcatggagatgattttctgtccgatggagtcgtgaagttcgcgcgccacttgtttgcgctcttcttcctgcgattgaatcattctgcgggatagaaacatcaactcccttttcgcaaggctggcttgcgccttcttgcggtctgttatgtcgctcaaaacagcccgataaacaacgggcgtttgcgcgtcgcgcgtcacggaggtttctacttgcgcccacaacagggaaccgtccgcccgcttcgccattatctcgtacgcctgcggctcttttgtctccagtagtttcttgcggcgaaggtagtgcgcgtcctgatattctttagaaataaacgccgaaaacggttttcccaccagttcgcttctagcgacttgtagcagatttgaaacggcgaggttcgcctgaagaattattcccttttcgctgactgataaatatccgaccggggccatgtcgtaaaggtcgtaatattgcgcctgcgacatctctaattcatcctgcgcgcgacgcagttcctcgttctgcatctcgagttcaatctggtgaacgcgcaactcatggagcagttttcttatttcgtcggtggacattaattccagacgctcatgagcgcgctcagcgtttttatcggcttcgacctcggcttttttgcgaagaacagctaacttctcctcttcgcgtttgttatcgttcataatcatttctccttatgcaattcagccgccgctgcggctatcctccgcgcgcttgcgcaggtcatccgccggggcggccctcttgtcttctctgtcagacattattgtcgataccctgtttcaatcgcttacaattgaattgcatcgtttatgtcagccacttttgaatcatgcttatgtattccatattgctgaaaggtttggccaagtgatccattttcggatccctcgtctctaattccatcatggactgcaaatactcgaagttcccagacacgaaaattatcgggatttcggagtctgtttccctgattctttcgtacacctccattccgttcatatccggcaggacgaaatcaaggctgatggcgtcgaaagaattcatgccgtgtcgctccagagccgttttcgcgtcaacagctagggtcggataatgaccgagtttttcaagaagcaaacatagaattcttcccagttgcggttcgtcttcaacaacaagcacgtttttccctttcgcatctttattttcgctggcaaccgccttcctgtcgccgcgggcagcttctgtgattatcggcagcgttattctgaaaatcgcgcccttgtccgcttcgctttcgcactcgacggttcccccgtgcttgtccatgcaacgcttaacatttgaaaggccgtatccggtgccttttacgtccggcgggtaagctccggtcatatccccgctgcctttcaacgagaacaagggatcaaacatcttgtctttccattcacgaggaatgccgcagccattgtcggcaagttcgattcggatgatgttgttttccgcgcgcgtttttatgcgcaacaccggtttttcggttttgctcatagcttgtgtcgcattattgataaggttgatcaaggcgttttcgagaagcccggcgtccgcaatcacgccatccaaacccgctccgtaatcgacgaccacatcgatattcttcaaattgcctctcagcgtcttgataatcatgtctatcttgtcgttaaggctaaatcggcttagtttaagctgctgatccttggcaaagaacaataagttccttgccagcccgcctcctctgtttgcggtttccagaatggtttcgacatctgatttcacgtccggcggcaagtcttgggtcaggagcaattcgctcgttcccaagatgatggttagaacgttgttgaaatcgtgcgccatccgtcccgcaagctggccgatggccgccattttatcctgttcgagatactttctccttgcgtcttcgtgattcttttgttccgtgatgtcgctgagcgcggctcggcacacctgcgcgccatccgcttcgtgcgccacaatcgcatggattcgcgcccagaagaagtcgcggtttttccccgctattcttatttcgcatacctgcgggtcgcctgtttcaaacaattccttgcggtgtctgtagtaaatatcctgatcttcggagagaatgaatccagtcagcggctttttcaacagcgagcttcgagacatgcccagcagtccggcggcggtgagattcgcctccagaataagccccttctcgctgattgtaacgtagccgacaggagcaaggtcgtacaggtcgaaataccgcgcccgcgacgcttcaagttccgcctgcgcgcggcgcagctcttcgttctgcatctcaagctcaatttgatgcacgcgcagttcgtggagcaggcgttttgtttcaccgggggacaactcgtcaagattaacaggagcgccggatgcggcgttttcaagcgctttattctcggcccgcgcgcgaaggtctgcgtccgcttttccccggctattgtcatcgcacattgtcgcccccgttctttttcggcgatgttttttcttcgccggattcagaccggacacatttcccgcgcgcggttattctgacaaatgtgacaaccacgccctcgataacattttccatggttcggtacggcatgattcgcatggtgtacgaatcgcccttcagggtcttcacttcgcgctcttttgggatcagcgtgttcaacacatctcgcgcgtcggcgaccagcccgtcgtatccctcaaggttcgagacgatatgcccgacgggacgccccacatcgctgggtatcaggttgataatctgggtggcggtcggagtgaatcgcatgattcgcagttggtcgtcaacgaatactgtgccgattcccgtgcctgccagcaggttgttcatgtcgttgttggctctcgaaaggtcgatgactttctgctggagttcggcgttgactgtcgcaagttcctcgttcaccgattgcagttcttctttggacgtctcgagttcttcgtttgttgactgaagctcctcatttatcgactgcatttcttcgttcgaagaccttagctcttcgttggatgtctgaagttgctcggtggtggtctgaagatactcatccttggcgcgcaattctttcctcatcgcctccaagcgcgagccgatgtctgttgcgttgtcgaaagcgccgtctgtgtcggcggcgatttctcgcttttcactgtctgatatccgaggctcttcaatgatgacaatgaaaagctcttgcgctgtttccgcgccagtgggcgccggaatgggttttaccgtcagatttaccgtcgtgaagtcgccgtttgttttgacgcgcaggccgtcatggcgcacggcttcctttgagacggcggttttgtgcaaagccgttgttagttcgcggcccaatccctcgcgggccatcttcaacacattggcgacgcctgcgacgccgggcgaaggttccagaaaatggccggctcgtccatgtatgtacaagatgtcgccgccgctgttgactattatgccggtcattgccgcgtgttgaagcagcgccttctcagccaactctcgaagaggcattttatattcatccgttgtttttcttttttggcgggacgaggcttcttccgtcgccgaactcggaagaaagcggctgagggacgcgcgctgcgcgccttgaatgtcatctttgcgccgatatagttttgctttgtggtccacggaggcaaaaaggctcgcgaaatcgccgattgtctcggatgtgccgagaaaaagaaatccgttcggattcaacgcgtaatggaagaggggaatgagctttttctgaaggtctccgcccatatagattagcaggttgcggcaactgatgaggtcgatttttgaaaagggagggtctttgattacattctgttcggagaaaatcaaaatatcgcgaaggcttttgcgaatccgataggagccgccgccgggttcggcctcaaaaaaacgctccagcctctcaggcgagacgtcggcggcgatgctggccggatataggcctgttctggcagtgtcgatggcgtggccatcaatatctgtggcgaacacctgcaatttgaaattttgtttctgttcctcaagtcgctcctgcagcaacatggcgatggaataagcctcttcgccggttgagcatcccagcgaccagacgcgcagcgcggcgcctgcgggcttgcctgcgaagagaagcggcagagcctgtttctccagcgctttgaacgcctcttggtctcggaaaaaactggtaactccaatcagcaggtctcgaaacagggcgtccacctcgtcctttgaccgctgaagatattttatgtattcctctatcttgtctatctggttgacggccatccggcgctcgatccgccgatggatggtattgggcttatattgggaaaagtcatgtccggtctggttgcgcaacaggattaaaacctttttcagcatatcttccggtttagggagagagcctgcggccgggcgcgttgttttgccgaacgcatgggcggcgtaagcgattagttgcggcggcatttcggcgggcggcagaacataatccaccagaccggttgcgatggcgtttctaggcattccgtcgtattcagtggattccgggttctgcgccataaccatgccgccctcgcccttgatcgcccgcactcccagagcgccgtcgctgcccgtgccggagagcactatgcagatagctcgctcgcgctgatcctgcgcaagagagcggaaaaaaaaatcaatgggaagccgctggcctcgcggcgcggccggctccaacagttcaagcgtgccgccgataaaagccatgtcgcgaccgggagggatgatgtatgcgcagtttggctccaccaccatcccgtctttaacttctaataccttcattcgagtatagcgtttgaccaactcggtgaggatgctcttgtgatccggagcaagatgctgcacgaggacaaaagccatatccgggttggcgttcgcgggcatgcctgaaaaaaaagcctcgaacgccgcaagccctcctgccgacgcgccgattccgacgatggggaaatcctttgggaggtcttgttttccattgtctgcggaaacctcatccacaagcgtcttcttgggcgattcagcgggggccttaacatcggtttttatctttctaggcataaaacagtctcctgactagtcggattggccgatagagccggcaaatcttcggcaaatttcataacggcgagatgctttgttgacgtcgcattttttaagcgagaaccttagcctgatttttcctgtgaaaaatccgagttaagtctcttttgctgcaaattgcgcctcgagattcagccgtagaataaccgcgccttaatcccagaaaaggattcggtttgacagaagtgaatcctgtggcgctttccatgttgcgcaaagatgtggttctcagactcaacgaagaggctcttttctttaattgtaactcacttgaaactaactcgcgcgtgaattggaaaatatacttcgccggaatgtgaaagacgcccgtttaatctgcggaagagattgaaatatgccgctttatttcgtcgcgtaaagcggcgccataatttgccttttgcgagtgggctgggttcttgtcggtggaagcgattgccgggggcatagccgagcaggctagctgaaaaaccataaccagtagtcggaaataacacaaatttgtcgaagttacgcattagattcacggaatacatgcgcttgatgcaggccgagtctgtcgttgagcattttctgtatatgatcgtggagaccgtcaacgagggagcgtacgcgctccgtatcgggctcgacgtcgtggcaatcttcgtaataatgtattggcgtgtcgaagtgcaagtcgaactttgacggaaacggcaaaagtccgagcaagcccagccacggaaatatcggcgttatcggcagatgtttgaaccccatcactttcatgtcgagtttgccaattgtcatagcggattcctccgagccggtgacgcatgccgggatgattggagcgcggtactcaatcgcgtattccatgaatccgggggggaacgcgtccactttgtatttgttgaagatggtgtggaagtcgctctccgcgccggtgggaaacacaacaatgaggttttcgttctcgaagattttcattacgttttcgtcgcagccgactatctggccgcaccggttcaagaggatggagccgccggggatgcctgaaagcgccctgtggattattgttctgatgaatcgtggcttctcaagctccaccagcccggcggtccatatcatcacggcgtcgaatgggagtatcggcgcgtggttggacactatcaggccgactccttcggcggggatgttctgcgcgccgtgcgcgtccacgcgaaagtaattcatgtacatgaacagcgccgccgctcccgctttggatgtgacattcaggctggttccgaactcgtcgtatccgcttgggtcaaactgtatgtccgacatcagtatgcggtttctcatatattcggtcgctgtgccgtcgaagaaatgcttgaatttaagttttctgtagtcgtccattgtgttcacaagtcgatttcccctgattgcgatagtttaatcatcctcatcctagctctgggcgcggcgaagtctgattcgatgcgccgcagcgcctttctttttcctttccgcgcggattttctcaaatccggaggggtcgtatcccagttcctcgaacgcgcgcgcgccgtccactgtgaacggatactttatgtaattgagatcgaatttcagattgttcgaccacatgaacctgcctaaacggcgcgcgagaaattcaggaagcggcgccggcgtctttccgaacgagcggataacctcgcttaacggcaggtgtgcgcgccctctgatgttgtacgcgccgtgagcgttcgggctgcgcagaactcgaatgaaagcgtccagcatttcgtcctcgtaaataatctggaacatggggtcgaacccaagaagcgtgggaacaagtttgcctttcatataagcgcctagaatgctggctcctgaatctcgccagatgggaaccatccgcaggatgatcactctgaggctgtcggagctttccgcgtgcgtttggcaaatcatgtccgcctcgatgcggtctctgatgctgaggatgtctcggttgccaagcagaggacggctttcgagaataaccgccgggttgtcctgccttgcgccgtaaacgatggtggagcttggatatatgaactgcttgaccccgtatttgcgcgcaaggccgatcatgtggaacgtcccgtaaacgttcgtcatcatccgttcatcagtagtcaggctctcgccatggccgagggcgagatgcgccacggcgtctatggttccctcgtttttaaacacatcctcgatgcgcttttttcgcgcgtctccgtaaatgcgctttacacccagccacttctcctgtctgtcgtcgtccacgcagatgtcaacgttgacaatgttaatgtcttcgccccactcctcgcgcatcctcacggccagaagttttcctagatatcccgaaccgcctatcatgagcactttcatccgtcgctcccaatgttaacctgcgttggcgaaaaatgccggttaatagagttcttgtttccgaatatctcgttccgcctgtccccagtcctgaacagataggccctcttgtcggcctcgcagttcgtatagttcataggcgcgctttgcaatctgtgggctcaaatcgaccgcattctcgtctctttctgaaatgtcatgcaaaatcccagagagattctctttttctgtgtcgatcttacccttgcttcttgcaacctttttcgacacattacccgcgcgtttttcgatggttcttttgtcactcatgctttttcgtctcctttaatttcgaaatatcgcaatactccaacacgctcccaaaccaaacatattaaacaaactatgagggctgttgctcttttgagattattcgtattagcttaacaataccccaagccacaacagagtacacaataattgcgactaccgttgacggctcaaaaaccgaagtcgtttctatgccttctgaaagccccctgcggaatatgttttcaaaaggcacaatgaaaaatccggttaatccataaatgaatttcacaaagccgctagaaaggttggctcccatcaacttaagaacgaggcggaaaaccaaaagtatttccaaagcgccaaagaagtaatagactgaatatccgcccgtctgataaccggttgccttcttttcagttggagtcgtcacagcgcttgcgtcgccgatttgtgttgtttcagtctcttttacaacattttccatattcgtatcctccgattattattgatgcgtcggcccgcgttggcgaaaatgcggttagcaatccgattgaatactaaagcacaaagacagacgacgcatgcgtctgaaaaccgctgcatagacaacatgttgcatgcgccgtcgtttttgtgtggcccaaatctaaagcggcctcgccagaatcacttgacagctttcttcacgttctttttaatgtcgtgcgctgtgtcaactacggcttcctttactttatcagcctttttcgacactttattcacagctttgtcaacacgttccccgatgcttttcttgttgctcatagttttccgtctccttttattttggtttatcattatcggttcgtaatattctttccttatgcgctatgacttcctcgcccgggaattagctccatcagcctacgggagaggaacgatgatagtgtttgtgtccaaagtaaccgcgccggtgtcgctcgtcgctccggccaatactctgccgtctattctggagccggaaacacaagtgacgcttacgccggccagtatgtttccagtgaagttagcgccggctccaatagtcgcggatgcggaggcaacccaaaacacgttcccggcctgcgcgctgttggtcaccgaaacatttccagcgtttgcagtcagcgaggagccgatcaagaatacccagacggcattcgggtcgcccccgccgtcgagaacaaggtctgtgcttatgttcattgtgctggcggagctatagacgcccggtggaagtgtcagcgcgcccaaatccgcagttccaacgtctgcgtctggcgtcatacctatagcgaagttatacgcgtccaataagtcttgttttgctagaactgacaccgcatcgttaatgtgcgtcgtgccggtcactgtcggacttccggttattgatgcgcccggactcaatgaaacatttccatctatagtggttgcgccggtgttggtgatggtggcggctgccatgactccgaaagcgcaggtcgaaccaagcggaactgcgcccggagtgagttgcatggcaatcgtaaccgtgtcggtggcgctgtttattattccgtcattaactatcaggtcgaaagcgtatattccagtggaagtcggagtgaatgtaggcgtctgcactgtgccgctcgacaatgcaaccgccgggccgccggactgcgtccactcgtaagtgagggggttgccatccgcatccgcgctggcgcttccgtcgagagcgaccgcggcgggaacgcacggcagaatgagcgtttgatccgcccccgcatcggcgaccggcgctatgttgataagataattcacatgcgtattcgttgcgatgtcgtccgcgttgagcgatgtgtcgcggcaggcaatatagacagttacagcgcccgatgcgagacccgacgttgcgcagctctggctcattgtgccgtcgccgtcgcagtcgtcggccatgtctccgtatgcctgatcggcaagcgaccatttgcaatcagcgttctcattcgtgttgaacgtaatcgtcggcgagtgggttgcaagcgtcgaatctttcgcaggatcccaagcgctctgaacaggcggcgttatatccgcggttgtaaattcccacgtgtaatcagacgccgacgcaaccacggatgcgaactgagcgaccacggcaaacatcgctatgaaaatgagggctttgacggcgccgcagcgcccggccttgcggctgcccctgtgaacggaattgattattcttctaatagaatgtttcataatattcttccatgttttgtgtattgcaaacatttcactttatcaaagacacatagacgatgtttctaaacttctgactccctgttgcccgcatcgggcaatataagaaatcctttagttgccgaccaactcattgccggccacatccttggctccggcggggcctgttttgatcgtggcggtgtaagtggtcaattcatcgagagcgctgtcaggcgtaaaagtcgctgttacatcgacgtacgccacagaacccggaatttccgttactccctgcatcagggtaaatgttgccgtggtgattgtggcgggatccatcgcctcgctgaaggcggcggtgattactttcgtattgattgccacgccggaggcgttgtttaatggaacaacggcagtcacagcgggcgcggcggtgtctgttacaggcggcgggttccattttccggttcctccgcatcccgcaattactataccgatcagaattaaactaaacaaaagataagcacgtcgactcttaaagatattgatgataaacattttcatgaaatctttcataattgtcggcgatacatatcccttcgccttttgttattctctatgcataaattatctgaaatatcagaagccaatgatatcggcggaaaagcattcttgattaactcttatggcttgttgttgtaaccatattggctagcgagagtcgaatgttgtattgattagttgatcctactgtccgatatttgcaacctcaaatatttcaacaggaaacgactttcctttgagttgaaccggcgctaatgcgcgtaacgttatttttccttcaacccgcagcaaagcattctttgtgattaggatttgtccggcgcgcgctattgactctaccctctgtgcggtgttcacgacgtcgcctatgatcgtgtaatccattgtttcttcagttcctatgtttccgacaaccgcctcgccgtagtttatccctatgccgattcccagttttttcaactccggcggccagtcgcgttttaattcttcgaaagctctttgcatttccaaagcggcccgaattgcccatagcgtttcattttcgacaaaaaatgtattttttacgttcctctcgatgtctttggaggaccctatgcagcgggatgtttcaagtaaacgcggaaaagacttcagataatacggtccgaacggaaaaggcggtgcgaaaaaagcgcgataaacaaaaggttgttgacgggcgcggcagggcgtaactgcggataatacgcattatctgaagttcgaacgcaatcataaacatcattatataaaggcatatttgagcatttgcgcggcagcgcgggaggcgttctgcggtgtcgtttcattcaaattgacataaattaattcttgtcaaacgcgcttgaaacggggcgtttccggcatggttttcagtcgttttttaaccccgaaaagggccgcaaaaggggcgtttttcgtttgtttttacaaacgcggttttaacaggttttttaacgtgttttaacgggattcacactggtttcaatagcgtttacaccgttgtgactgtcacggtgtgaaaagactgattcaggcgacagcgatggccgctttggcgttttggagagcgatttgggacatgaattaatttatgtcatacgaaacgactcatgcggaaatgggtcggtcgcgcgctttatgctgacaaatgaggcgcgcaacccgacagttattaatgacccgccttctgacagtaatggtttctgtaaaaacaatcaagctgtctgtgaaataaataagctttataataaagcctataatcgttagcggcttcttctatgcatactcgtgacgaaacgtttcaaaagttttccctttttcttccccgcaagaatctttcgctcatgccgcttccgcgcgcgtgagcggcgcgcctgcgctataatattcaacgcgggcggcgggcagccgcgcctcgcggggagacgccgggattatgaccaaagacaaattgttgttgattgacacgttcggccttatatacaggttctatcacaccatgcccaagatgaagacggcggagggaattcccaccggggcggtgttcggcatggcgcgcgcgctgctgaagatttttaaagataataagcccgactatctggtggtggcgatggagtccgagacacccactttcaggcatgccgaatatgccgcctacaaagctcacagggacagaatgccggacgagttgcgggaacagattccggccatcaacgagcttatctccgctttcggtataactccggccaagctcgacgggtacgaggcggacgatgtgatcggcactctggcgcgggcgggcgcggaacacggccttgaggtcgatattcttacaggcgatagagatatgttccagttggtgaacgacagcgtatcagtgctgatgtcgctgaaaggctcctcagagcttgagaagttcgaccgcgaggcggttaaagaaaaaatgggcgtttatccggaacgcatacccgacctcaaagggcttgaaggcgacagttcggacaacatccccggagtgccgggcgtcggccccaaaacagcggtgtctctgctcgaacaattcggagatatggacgccgtgttcgactctcttgaacagattgacaagaaagggctgcgggaaaaactggcggctaacagggaacttgcggaactgagcagaaggctcggcacgatagagaaacacgcgccgctcccatttgaaatcggcgcgtacaaactcccggcggtcgacaacgaaaagcttgcggcgttcttcgagaaatatgaaatgagaagtttcatatcggagcttggaatgaaagaggaggcggccgccccgccccgccccgccgccgttcagttcgactcggtttataaggctgtcttcgacgaagccgaagtcatcgaagcgcttgagcgcgccgcctcgcgcggcaggctttgcgtagacctcgaaaccgacgggctggacaccttcgccgaccccatagtgggcatcgctctggcttccgaggccggcgacgccatctacatccccattcgacacggctccaccgtgaaacgcggcggcggcgaccttttcggcggcggcgacggctcggacgatgaagacgactccgacccggacgctgaaaaacagatagacccggaccgcgcaatcgctttgttgaaaccgtatctggaaaaccctgacatagaaaaaatcggccacaacctcaaattcgacgcgcagatgcttcgcgcggctggcgtgtctcttgccaacatcgcttacgactcattcatcgccgcttaccttatagacccggacggccgcagatacgggctgaaaacggtcgcggcgaacctgctgggagcgggcctgaaaacatacgaggatatggtcggcaagggaaaatctcagaagaaattctctgaggtcaagataagggacgcggtggattacgcctgcgctgacgtggacgccgcgttgaggatcgagccggagctttcgaggcggctggccgcagacggcctcgaccgcgtgttcaggaaaatcgagatgccccttatcccggtattggccgagatggagtggaacggagtggctctggacgcgtccgcgctcgcggggatgtccgaagacttcgccgcaagagagcgggcgctgagcgcggcggtggcggagcttgccggggcggatgtcaacctgaattccccgaaacaggtggccgagttgctgttcgtaaaactcggcctcagaaaagtcaagaaagaatccaccgacatagccgtcctcgaacagcttaaatgcgaccacccggcggtcccgctgataataaagttccggcaggcgagcaagcttcgcggcacatacatagacgctctgcccgcgctgataaacccgcgcacgggcagagtccacacgagcttcaaccagacgctggccgcgtcaggcagattgtcaagcagcaaccctaacatgcagaacatcccggtgcgctccgaggatgggcgcgagatcaggcgcgcgttcatccccggctccaaaggcctcgcccttgtctccgccgactactcccagatcgagatacggctcctcgccgagatgtccggcgacccttccctgctcgaagcgttccgcaaccgggaagacattcacgcgtccgtcgccgctcaggtgttcggagtccccgtctcggaagtgacgcaggaccagcgcagatacgcgaagacaatcaacttcggcctcatatacgggatgcgcgagttcaggctttcacaggagcttggcatctcccggcagcaggccgccgacttcatagaaacttatttctcgcggttccccggcgttcgcgacttcatagagaaaacaaacgaaaaactcctcgaagacggtttcgcagagacgctgttcggacgccgccgccgcgtgccggaactgaggtcttccaaccggcaggagcgcgaagcgggattgcgcgcggctttcaacacccgcattcaaggctctgcggcggacattatgaaactcgccatgatcgacgttcacaagatgatactcgcgggcgagatggacgctaaaatgctccttcaggttcatgacgaaatcgtgcttgaaacgcctgccgaaaaagtggcggacacggcggagaaaacccgcagagcaatggaagcagcgggccgcgattggggcgctctatccgtcgaacttccggcagacgtcaaagccgggccgaactggctcgacatggaaacggtttatacatgttattagatgattctacccactaccaagtgtgccatgcgcaaaactttttcttttgcgcatgatgcttttcaccaaatagtaaa

SEQ ID NO: 951 - DNA, 157137 bp, Artificial Sequence
  Synthetic Oligonucleotide
  misc_feature (1)..(40678): n is a, c, g, or t
nnnnnnnnnnnnnnnnnnnnnnnnnnnnnnnnnnnnnnnnnnnnnnnnnnnnnnnnnnnnnnnnnnnnnnnnnnnnnnnnnnnnnnnnnnnnnnnnnnnnnnnnnnnnnnnnnnnnnnnnnnnnnnnnnnnnnnnnnnnnnnnnnnnnnnnnnnnnnnnnnnnnnnnnnnnnnnnnnnnnnnnnnnnnnnnnnnnnnnnnnnnnnnnnnnnnnnnnnnnnnnnnnnnnnnnnnnnnnnnnnnnnnnnnnnnnnnnnnnnnnnnnnnnnnnnnnnnnnnnnnnnnnnnnnnnnnnnnnnnnnnnnnnnnnnnnnnnnnnnnnnnnnnnnnnnnnnnnnnnnnnnnnnnnnnnnnnnnnnnnnnnnnnnnnnnnnnnnnnnnnnnnnnnnnnnnnnnnnnnnnnnnnnnnnnnnnnnnnnnnnnnnnnnnnnnnnnnnnnnnnnnnnnnnnnnnnnnnnnnnnnnnnnnnnnnnnnnnnnnnnnnnnnnnnnnnnnnnnnnnnnnnnnnnnnnnnnnnnnnnnnnnnnnnnnnnnnnnnnnnnnnnnnnnnnnnnnnnnnnnnnnnnnnnnnnnnnnnnnnnnnnnnnnnnnnnnnnnnnnnnnnnnnnnnnnnnnnnnnnnnnnnnnnnnnnnnnnnnnnnnnnnnnnnnnnnnnnnnnnnnnnnnnnnnnnnnnnnnnnnnnnnnnnnnnnnnnnnnnnnnnnnnnnnnnnnnnnnnnnnnnnnnnnnnnnnnnnnnnnnnnnnnnnnnnnnnnnnnnnnnnnnnnnnnnnnnnnnnnnnnnnnnnnnnnnnnnnnnnnnnnnnnnnnnnnnnnnnnnnnnnnnnnnnnnnnnnnnnnnnnnnnnnnnnnnnnnnnnnnnnnnnnnnnnnnnnnnnnnnnnnnnnnnnnnnnnnnnnnnnnnnnnnnnnnnnnnnnnnnnnnnnnnnnnnnnnnnnnnnnnnnnnnnnnnnnnnnnnnnnnnnnnnnnnnnnnnnnnnnnnnnnnnnnnnnnnnnnnnnnnnnnnnnnnnnnnnnnnnnnnnnnnnnnnnnnnnnnnnnnnnnnnnnnnnnnnnnnnnnnnnnnnnnnnnnnnnnnnnnnnnnnnnnnnnnnnnnnnnnnnnnnnnnnnnnnnnnnnnnnnnnnnnnnnnnnnnnnnnnnnnnnnnnnnnnnnnnnnnnnnnnnnnnnnnnnnnnnnnnnnnnnnnnnnnnnnnnnnnnnnnnnnnnnnnnnnnnnnnnnnnnnnnnnnnnnnnnnnnnnnnnnnnnnnnnnnnnnnnnnnnnnnnnnnnnnnnnnnnnnnnnnnnnnnnnnnnnnnnnnnnnnnnnnnnnnnnnnnnnnnnnnnnnnnnnnnnnnnnnnnnnnnnnnnnnnnnnnnnnnnnnnnnnnnnnnnnnnnnnnnnnnnnnnnnnnnnnnnnnnnnnnnnnnnnnnnnnnnnnnnnnnnnnnnnnnnnnnnnnnnnnnnnnnnnnnnnnnnnnnnnnnnnnnnnnnnnnnnnnnnnnnnnnnnnnnnnnnnnnnnnnnnnnnnnnnnnnnnnnnnnnnnnnnnnnnnnnnnnnnnnnnnnnnnnnnnnnnnnnnnnnnnnnnnnnnnnnnnnnnnnnnnnnnnnnnnnnnnnnnnnnnnnnnnnnnnnnnnnnnnnnnnnnnnnnnnnnnnnnnnnnnnnnnnnnnnnnnnnnnnnnnnnnnnnnnnnnnnnnnnnnnnnnnnnnnnnnnnnnnnnnnnnnnnnnnnnnnnnnnnnnnnnnnnnnnnnnnnnnnnnnnnnnnnnnnnnnnnnnnnnnnnnnnnnnnnnnnnnnnnnnnnnnnnnnnnnnnnnnnnnnnnnnnnnnnnnnnnnnnnnnnnnnnnnnnnnnnnnnnnnnnnnnnnnnnnnnnnnnnnnnnnnnnnnnnnnnnnnnnnnnnnnnnnnnnnnnnnnnnnnnnnnnnnnnnnnnnnnnnnnnnnnnnnnnnnnnnnnnnnnnnnnnnnnnnnnnnnnnnnnnnnnnnnnnnnnnnnnnnnnnnnnnnnnnnnnnnnnnnnnnnnnnnnnnnnnnnnnnnnnnnnnnnnnnnnnnnnnnnnnnnnnnnnnnnnnnnnnnnnnnnnnnnnnnnnnnnnnnnnnnnnnnnnnnnnnnnnnnnnnnnnnnnnnnnnnnnnnnnnnnnnnnnnnnnnnnnnnnnnnnnnnnnnnnnnnnnnnnnnnnnnnnnnnnnnnnnnnnnnnnnnnnnnnnnnnnnnnnnnnnnnnnnnnnnnnnnnnnnnnnnnnnnnnnnnnnnnnnnnnnnnnnnnnnnnnnnnnnnnnnnnnnnnnnnnnnnnnnnnnnnnnnnnnnnnnnnnnnnnnnnnnnnnnnnnnnnnnnnnnnnnnnnnnnnnnnnnnnnnnnnnnnnnnnnnnnnnnnnnnnnnnnnnnnnnnnnnnnnnnnnnnnnnnnnnnnnnnnnnnnnnnnnnnnnnnnnnnnnnnnnnnnnnnnnnnnnnnnnnnnnnnnnnnnnnnnnnnnnnnnnnnnnnnnnnnnnnnnnnnnnnnnnnnnnnnnnnnnnnnnnnnnnnnnnnnnnnnnnnnnnnnnnnnnnnnnnnnnnnnnnnnnnnnnnnnnnnnnnnnnnnnnnnnnnnnnnnnnnnnnnnnnnnnnnnnnnnnnnnnnnnnnnnnnnnnnnnnnnnnnnnnnnnnnnnnnnnnnnnnnnnnnnnnnnnnnnnnnnnnnnnnnnnnnnnnnnnnnnnnnnnnnnnnnnnnnnnnnnnnnnnnnnnnnnnnnnnnnnnnnnnnnnnnnnnnnnnnnnnnnnnnnnnnnnnnnnnnnnnnnnnnnnnnnnnnnnnnnnnnnnnnnnnnnnnnnnnnnnnnnnnnnnnnnnnnnnnnnnnnnnnnnnnnnnnnnnnnnnnnnnnnnnnnnnnnnnnnnnnnnnnnnnnnnnnnnnnnnnnnnnnnnnnnnnnnnnnnnnnnnnnnnnnnnnnnnnnnnnnnnnnnnnnnnnnnnnnnnnnnnnnnnnnnnnnnnnnnnnnnnnnnnnnnnnnnnnnnnnnnnnnnnnnnnnnnnnnnnnnnnnnnnnnnnnnnnnnnnnnnnnnnnnnnnnnnnnnnnnnnnnnnnnnnnnnnnnnnnnnnnnnnnnnnnnnnnnnnnnnnnnnnnnnnnnnnnnnnnnnnnnnnnnnnnnnnnnnnnnnnnnnnnnnnnnnnnnnnnnnnnnnnnnnnnnnnnnnnnnnnnnnnnnnnnnnnnnnnnnnnnnnnnnnnnnnnnnnnnnnnnnnnnnnnnnnnnnnnnnnnnnnnnnnnnnnnnnnnnnnnnnnnnnnnnnnnnnnnnnnnnnnnnnnnnnnnnnnnnnnnnnnnnnnnnnnnnnnnnnnnnnnnnnnnnnnnnnnnnnnnnnnnnnnnnnnnnnnnnnnnnnnnnnnnnnnnnnnnnnnnnnnnnnnnnnnnnnnnnnnnnnnnnnnnnnnnnnnnnnnnnnnnnnnnnnnnnnnnnnnnnnnnnnnnnnnnnnnnnnnnnnnnnnnnnnnnnnnnnnnnnnnnnnnnnnnnnnnnnnnnnnnnnnnnnnnnnnnnnnnnnnnnnnnnnnnnnnnnnnnnnnnnnnnnnnnnnnnnnnnnnnnnnnnnnnnnnnnnnnnnnnnnnnnnnnnnnnnnnnnnnnnnnnnnnnnnnnnnnnnnnnnnnnnnnnnnnnnnnnnnnnnnnnnnnnnnnnnnnnnnnnnnnnnnnnnnnnnnnnnnnnnnnnnnnnnnnnnnnnnnnnnnnnnnnnnnnnnnnnnnnnnnnnnnnnnnnnnnnnnnnnnnnnnnnnnnnnnnnnnnnnnnnnnnnnnnnnnnnnnnnnnnnnnnnnnnnnnnnnnnnnnnnnnnnnnnnnnnnnnnnnnnnnnnnnnnnnnnnnnnnnnnnnnnnnnnnnnnnnnnnnnnnnnnnnnnnnnnnnnnnnnnnnnnnnnnnnnnnnnnnnnnnnnnnnnnnnnnnnnnnnnnnnnnnnnnnnnnnnnnnnnnnnnnnnnnnnnnnnnnnnnnnnnnnnnnnnnnnnnnnnnnnnnnnnnnnnnnnnnnnnnnnnnnnnnnnnnnnnnnnnnnnnnnnnnnnnnnnnnnnnnnnnnnnnnnnnnnnnnnnnnnnnnnnnnnnnnnnnnnnnnnnnnnnnnnnnnnnnnnnnnnnnnnnnnnnnnnnnnnnnnnnnnnnnnnnnnnnnnnnnnnnnnnnnnnnnnnnnnnnnnnnnnnnnnnnnnnnnnnnnnnnnnnnnnnnnnnnnnnnnnnnnnnnnnnnnnnnnnnnnnnnnnnnnnnnnnnnnnnnnnnnnnnnnnnnnnnnnnnnnnnnnnnnnnnnnnnnnnnnnnnnnnnnnnnnnnnnnnnnnnnnnnnnnnnnnnnnnnnnnnnnnnnnnnnnnnnnnnnnnnnnnnnnnnnnnnnnnnnnnnnnnnnnnnnnnnnnnnnnnnnnnnnnnnnnnnnnnnnnnnnnnnnnnnnnnnnnnnnnnnnnnnnnnnnnnnnnnnnnnnnnnnnnnnnnnnnnnnnnnnnnnnnnnnnnnnnnnnnnnnnnnnnnnnnnnnnnnnnnnnnnnnnnnnnnnnnnnnnnnnnnnnnnnnnnnnnnnnnnnnnnnnnnnnnnnnnnnnnnnnnnnnnnnnnnnnnnnnnnnnnnnnnnnnnnnnnnnnnnnnnnnnnnnnnnnnnnnnnnnnnnnnnnnnnnnnnnnnnnnnnnnnnnnnnnnnnnnnnnnnnnnnnnnnnnnnnnnnnnnnnnnnnnnnnnnnnnnnnnnnnnnnnnnnnnnnnnnnnnnnnnnnnnnnnnnnnnnnnnnnnnnnnnnnnnnnnnnnnnnnnnnnnnnnnnnnnnnnnnnnnnnnnnnnnnnnnnnnnnnnnnnnnnnnnnnnnnnnnnnnnnnnnnnnnnnnnnnnnnnnnnnnnnnnnnnnnnnnnnnnnnnnnnnnnnnnnnnnnnnnnnnnnnnnnnnnnnnnnnnnnnnnnnnnnnnnnnnnnnnnnnnnnnnnnnnnnnnnnnnnnnnnnnnnnnnnnnnnnnnnnnnnnnnnnnnnnnnnnnnnnnnnnnnnnnnnnnnnnnnnnnnnnnnnnnnnnnnnnnnnnnnnnnnnnnnnnnnnnnnnnnnnnnnnnnnnnnnnnnnnnnnnnnnnnnnnnnnnnnnnnnnnnnnnnnnnnnnnnnnnnnnnnnnnnnnnnnnnnnnnnnnnnnnnnnnnnnnnnnnnnnnnnnnnnnnnnnnnnnnnnnnnnnnnnnnnnnnnnnnnnnnnnnnnnnnnnnnnnnnnnnnnnnnnnnnnnnnnnnnnnnnnnnnnnnnnnnnnnnnnnnnnnnnnnnnnnnnnnnnnnnnnnnnnnnnnnnnnnnnnnnnnnnnnnnnnnnnnnnnnnnnnnnnnnnnnnnnnnnnnnnnnnnnnnnnnnnnnnnnnnnnnnnnnnnnnnnnnnnnnnnnnnnnnnnnnnnnnnnnnnnnnnnnnnnnnnnnnnnnnnnnnnnnnnnnnnnnnnnnnnnnnnnnnnnnnnnnnnnnnnnnnnnnnnnnnnnnnnnnnnnnnnnnnnnnnnnnnnnnnnnnnnnnnnnnnnnnnnnnnnnnnnnnnnnnnnnnnnnnnnnnnnnnnnnnnnnnnnnnnnnnnnnnnnnnnnnnnnnnnnnnnnnnnnnnnnnnnnnnnnnnnnnnnnnnnnnnnnnnnnnnnnnnnnnnnnnnnnnnnnnnnnnnnnnnnnnnnnnnnnnnnnnnnnnnnnnnnnnnnnnnnnnnnnnnnnnnnnnnnnnnnnnnnnnnnnnnnnnnnnnnnnnnnnnnnnnnnnnnnnnnnnnnnnnnnnnnnnnnnnnnnnnnnnnnnnnnnnnnnnnnnnnnnnnnnnnnnnnnnnnnnnnnnnnnnnnnnnnnnnnnnnnnnnnnnnnnnnnnnnnnnnnnnnnnnnnnnnnnnnnnnnnnnnnnnnnnnnnnnnnnnnnnnnnnnnnnnnnnnnnnnnnnnnnnnnnnnnnnnnnnnnnnnnnnnnnnnnnnnnnnnnnnnnnnnnnnnnnnnnnnnnnnnnnnnnnnnnnnnnnnnnnnnnnnnnnnnnnnnnnnnnnnnnnnnnnnnnnnnnnnnnnnnnnnnnnnnnnnnnnnnnnnnnnnnnnnnnnnnnnnnnnnnnnnnnnnnnnnnnnnnnnnnnnnnnnnnnnnnnnnnnnnnnnnnnnnnnnnnnnnnnnnnnnnnnnnnnnnnnnnnnnnnnnnnnnnnnnnnnnnnnnnnnnnnnnnnnnnnnnnnnnnnnnnnnnnnnnnnnnnnnnnnnnnnnnnnnnnnnnnnnnnnnnnnnnnnnnnnnnnnnnnnnnnnnnnnnnnnnnnnnnnnnnnnnnnnnnnnnnnnnnnnnnnnnnnnnnnnnnnnnnnnnnnnnnnnnnnnnnnnnnnnnnnnnnnnnnnnnnnnnnnnnnnnnnnnnnnnnnnnnnnnnnnnnnnnnnnnnnnnnnnnnnnnnnnnnnnnnnnnnnnnnnnnnnnnnnnnnnnnnnnnnnnnnnnnnnnnnnnnnnnnnnnnnnnnnnnnnnnnnnnnnnnnnnnnnnnnnnnnnnnnnnnnnnnnnnnnnnnnnnnnnnnnnnnnnnnnnnnnnnnnnnnnnnnnnnnnnnnnnnnnnnnnnnnnnnnnnnnnnnnnnnnnnnnnnnnnnnnnnnnnnnnnnnnnnnnnnnnnnnnnnnnnnnnnnnnnnnnnnnnnnnnnnnnnnnnnnnnnnnnnnnnnnnnnnnnnnnnnnnnnnnnnnnnnnnnnnnnnnnnnnnnnnnnnnnnnnnnnnnnnnnnnnnnnnnnnnnnnnnnnnnnnnnnnnnnnnnnnnnnnnnnnnnnnnnnnnnnnnnnnnnnnnnnnnnnnnnnnnnnnnnnnnnnnnnnnnnnnnnnnnnnnnnnnnnnnnnnnnnnnnnnnnnnnnnnnnnnnnnnnnnnnnnnnnnnnnnnnnnnnnnnnnnnnnnnnnnnnnnnnnnnnnnnnnnnnnnnnnnnnnnnnnnnnnnnnnnnnnnnnnnnnnnnnnnnnnnnnnnnnnnnnnnnnnnnnnnnnnnnnnnnnnnnnnnnnnnnnnnnnnnnnnnnnnnnnnnnnnnnnnnnnnnnnnnnnnnnnnnnnnnnnnnnnnnnnnnnnnnnnnnnnnnnnnnnnnnnnnnnnnnnnnnnnnnnnnnnnnnnnnnnnnnnnnnnnnnnnnnnnnnnnnnnnnnnnnnnnnnnnnnnnnnnnnnnnnnnnnnnnnnnnnnnnnnnnnnnnnnnnnnnnnnnnnnnnnnnnnnnnnnnnnnnnnnnnnnnnnnnnnnnnnnnnnnnnnnnnnnnnnnnnnnnnnnnnnnnnnnnnnnnnnnnnnnnnnnnnnnnnnnnnnnnnnnnnnnnnnnnnnnnnnnnnnnnnnnnnnnnnnnnnnnnnnnnnnnnnnnnnnnnnnnnnnnnnnnnnnnnnnnnnnnnnnnnnnnnnnnnnnnnnnnnnnnnnnnnnnnnnnnnnnnnnnnnnnnnnnnnnnnnnnnnnnnnnnnnnnnnnnnnnnnnnnnnnnnnnnnnnnnnnnnnnnnnnnnnnnnnnnnnnnnnnnnnnnnnnnnnnnnnnnnnnnnnnnnnnnnnnnnnnnnnnnnnnnnnnnnnnnnnnnnnnnnnnnnnnnnnnnnnnnnnnnnnnnnnnnnnnnnnnnnnnnnnnnnnnnnnnnnnnnnnnnnnnnnnnnnnnnnnnnnnnnnnnnnnnnnnnnnnnnnnnnnnnnnnnnnnnnnnnnnnnnnnnnnnnnnnnnnnnnnnnnnnnnnnnnnnnnnnnnnnnnnnnnnnnnnnnnnnnnnnnnnnnnnnnnnnnnnnnnnnnnnnnnnnnnnnnnnnnnnnnnnnnnnnnnnnnnnnnnnnnnnnnnnnnnnnnnnnnnnnnnnnnnnnnnnnnnnnnnnnnnnnnnnnnnnnnnnnnnnnnnnnnnnnnnnnnnnnnnnnnnnnnnnnnnnnnnnnnnnnnnnnnnnnnnnnnnnnnnnnnnnnnnnnnnnnnnnnnnnnnnnnnnnnnnnnnnnnnnnnnnnnnnnnnnnnnnnnnnnnnnnnnnnnnnnnnnnnnnnnnnnnnnnnnnnnnnnnnnnnnnnnnnnnnnnnnnnnnnnnnnnnnnnnnnnnnnnnnnnnnnnnnnnnnnnnnnnnnnnnnnnnnnnnnnnnnnnnnnnnnnnnnnnnnnnnnnnnnnnnnnnnnnnnnnnnnnnnnnnnnnnnnnnnnnnnnnnnnnnnnnnnnnnnnnnnnnnnnnnnnnnnnnnnnnnnnnnnnnnnnnnnnnnnnnnnnnnnnnnnnnnnnnnnnnnnnnnnnnnnnnnnnnnnnnnnnnnnnnnnnnnnnnnnnnnnnnnnnnnnnnnnnnnnnnnnnnnnnnnnnnnnnnnnnnnnnnnnnnnnnnnnnnnnnnnnnnnnnnnnnnnnnnnnnnnnnnnnnnnnnnnnnnnnnnnnnnnnnnnnnnnnnnnnnnnnnnnnnnnnnnnnnnnnnnnnnnnnnnnnnnnnnnnnnnnnnnnnnnnnnnnnnnnnnnnnnnnnnnnnnnnnnnnnnnnnnnnnnnnnnnnnnnnnnnnnnnnnnnnnnnnnnnnnnnnnnnnnnnnnnnnnnnnnnnnnnnnnnnnnnnnnnnnnnnnnnnnnnnnnnnnnnnnnnnnnnnnnnnnnnnnnnnnnnnnnnnnnnnnnnnnnnnnnnnnnnnnnnnnnnnnnnnnnnnnnnnnnnnnnnnnnnnnnnnnnnnnnnnnnnnnnnnnnnnnnnnnnnnnnnnnnnnnnnnnnnnnnnnnnnnnnnnnnnnnnnnnnnnnnnnnnnnnnnnnnnnnnnnnnnnnnnnnnnnnnnnnnnnnnnnnnnnnnnnnnnnnnnnnnnnnnnnnnnnnnnnnnnnnnnnnnnnnnnnnnnnnnnnnnnnnnnnnnnnnnnnnnnnnnnnnnnnnnnnnnnnnnnnnnnnnnnnnnnnnnnnnnnnnnnnnnnnnnnnnnnnnnnnnnnnnnnnnnnnnnnnnnnnnnnnnnnnnnnnnnnnnnnnnnnnnnnnnnnnnnnnnnnnnnnnnnnnnnnnnnnnnnnnnnnnnnnnnnnnnnnnnnnnnnnnnnnnnnnnnnnnnnnnnnnnnnnnnnnnnnnnnnnnnnnnnnnnnnnnnnnnnnnnnnnnnnnnnnnnnnnnnnnnnnnnnnnnnnnnnnnnnnnnnnnnnnnnnnnnnnnnnnnnnnnnnnnnnnnnnnnnnnnnnnnnnnnnnnnnnnnnnnnnnnnnnnnnnnnnnnnnnnnnnnnnnnnnnnnnnnnnnnnnnnnnnnnnnnnnnnnnnnnnnnnnnnnnnnnnnnnnnnnnnnnnnnnnnnnnnnnnnnnnnnnnnnnnnnnnnnnnnnnnnnnnnnnnnnnnnnnnnnnnnnnnnnnnnnnnnnnnnnnnnnnnnnnnnnnnnnnnnnnnnnnnnnnnnnnnnnnnnnnnnnnnnnnnnnnnnnnnnnnnnnnnnnnnnnnnnnnnnnnnnnnnnnnnnnnnnnnnnnnnnnnnnnnnnnnnnnnnnnnnnnnnnnnnnnnnnnnnnnnnnnnnnnnnnnnnnnnnnnnnnnnnnnnnnnnnnnnnnnnnnnnnnnnnnnnnnnnnnnnnnnnnnnnnnnnnnnnnnnnnnnnnnnnnnnnnnnnnnnnnnnnnnnnnnnnnnnnnnnnnnnnnnnnnnnnnnnnnnnnnnnnnnnnnnnnnnnnnnnnnnnnnnnnnnnnnnnnnnnnnnnnnnnnnnnnnnnnnnnnnnnnnnnnnnnnnnnnnnnnnnnnnnnnnnnnnnnnnnnnnnnnnnnnnnnnnnnnnnnnnnnnnnnnnnnnnnnnnnnnnnnnnnnnnnnnnnnnnnnnnnnnnnnnnnnnnnnnnnnnnnnnnnnnnnnnnnnnnnnnnnnnnnnnnnnnnnnnnnnnnnnnnnnnnnnnnnnnnnnnnnnnnnnnnnnnnnnnnnnnnnnnnnnnnnnnnnnnnnnnnnnnnnnnnnnnnnnnnnnnnnnnnnnnnnnnnnnnnnnnnnnnnnnnnnnnnnnnnnnnnnnnnnnnnnnnnnnnnnnnnnnnnnnnnnnnnnnnnnnnnnnnnnnnnnnnnnnnnnnnnnnnnnnnnnnnnnnnnnnnnnnnnnnnnnnnnnnnnnnnnnnnnnnnnnnnnnnnnnnnnnnnnnnnnnnnnnnnnnnnnnnnnnnnnnnnnnnnnnnnnnnnnnnnnnnnnnnnnnnnnnnnnnnnnnnnnnnnnnnnnnnnnnnnnnnnnnnnnnnnnnnnnnnnnnnnnnnnnnnnnnnnnnnnnnnnnnnnnnnnnnnnnnnnnnnnnnnnnnnnnnnnnnnnnnnnnnnnnnnnnnnnnnnnnnnnnnnnnnnnnnnnnnnnnnnnnnnnnnnnnnnnnnnnnnnnnnnnnnnnnnnnnnnnnnnnnnnnnnnnnnnnnnnnnnnnnnnnnnnnnnnnnnnnnnnnnnnnnnnnnnnnnnnnnnnnnnnnnnnnnnnnnnnnnnnnnnnnnnnnnnnnnnnnnnnnnnnnnnnnnnnnnnnnnnnnnnnnnnnnnnnnnnnnnnnnnnnnnnnnnnnnnnnnnnnnnnnnnnnnnnnnnnnnnnnnnnnnnnnnnnnnnnnnnnnnnnnnnnnnnnnnnnnnnnnnnnnnnnnnnnnnnnnnnnnnnnnnnnnnnnnnnnnnnnnnnnnnnnnnnnnnnnnnnnnnnnnnnnnnnnnnnnnnnnnnnnnnnnnnnnnnnnnnnnnnnnnnnnnnnnnnnnnnnnnnnnnnnnnnnnnnnnnnnnnnnnnnnnnnnnnnnnnnnnnnnnnnnnnnnnnnnnnnnnnnnnnnnnnnnnnnnnnnnnnnnnnnnnnnnnnnnnnnnnnnnnnnnnnnnnnnnnnnnnnnnnnnnnnnnnnnnnnnnnnnnnnnnnnnnnnnnnnnnnnnnnnnnnnnnnnnnnnnnnnnnnnnnnnnnnnnnnnnnnnnnnnnnnnnnnnnnnnnnnnnnnnnnnnnnnnnnnnnnnnnnnnnnnnnnnnnnnnnnnnnnnnnnnnnnnnnnnnnnnnnnnnnnnnnnnnnnnnnnnnnnnnnnnnnnnnnnnnnnnnnnnnnnnnnnnnnnnnnnnnnnnnnnnnnnnnnnnnnnnnnnnnnnnnnnnnnnnnnnnnnnnnnnnnnnnnnnnnnnnnnnnnnnnnnnnnnnnnnnnnnnnnnnnnnnnnnnnnnnnnnnnnnnnnnnnnnnnnnnnnnnnnnnnnnnnnnnnnnnnnnnnnnnnnnnnnnnnnnnnnnnnnnnnnnnnnnnnnnnnnnnnnnnnnnnnnnnnnnnnnnnnnnnnnnnnnnnnnnnnnnnnnnnnnnnnnnnnnnnnnnnnnnnnnnnnnnnnnnnnnnnnnnnnnnnnnnnnnnnnnnnnnnnnnnnnnnnnnnnnnnnnnnnnnnnnnnnnnnnnnnnnnnnnnnnnnnnnnnnnnnnnnnnnnnnnnnnnnnnnnnnnnnnnnnnnnnnnnnnnnnnnnnnnnnnnnnnnnnnnnnnnnnnnnnnnnnnnnnnnnnnnnnnnnnnnnnnnnnnnnnnnnnnnnnnnnnnnnnnnnnnnnnnnnnnnnnnnnnnnnnnnnnnnnnnnnnnnnnnnnnnnnnnnnnnnnnnnnnnnnnnnnnnnnnnnnnnnnnnnnnnnnnnnnnnnnnnnnnnnnnnnnnnnnnnnnnnnnnnnnnnnnnnnnnnnnnnnnnnnnnnnnnnnnnnnnnnnnnnnnnnnnnnnnnnnnnnnnnnnnnnnnnnnnnnnnnnnnnnnnnnnnnnnnnnnnnnnnnnnnnnnnnnnnnnnnnnnnnnnnnnnnnnnnnnnnnnnnnnnnnnnnnnnnnnnnnnnnnnnnnnnnnnnnnnnnnnnnnnnnnnnnnnnnnnnnnnnnnnnnnnnnnnnnnnnnnnnnnnnnnnnnnnnnnnnnnnnnnnnnnnnnnnnnnnnnnnnnnnnnnnnnnnnnnnnnnnnnnnnnnnnnnnnnnnnnnnnnnnnnnnnnnnnnnnnnnnnnnnnnnnnnnnnnnnnnnnnnnnnnnnnnnnnnnnnnnnnnnnnnnnnnnnnnnnnnnnnnnnnnnnnnnnnnnnnnnnnnnnnnnnnnnnnnnnnnnnnnnnnnnnnnnnnnnnnnnnnnnnnnnnnnnnnnnnnnnnnnnnnnnnnnnnnnnnnnnnnnnnnnnnnnnnnnnnnnnnnnnnnnnnnnnnnnnnnnnnnnnnnnnnnnnnnnnnnnnnnnnnnnnnnnnnnnnnnnnnnnnnnnnnnnnnnnnnnnnnnnnnnnnnnnnnnnnnnnnnnnnnnnnnnnnnnnnnnnnnnnnnnnnnnnnnnnnnnnnnnnnnnnnnnnnnnnnnnnnnnnnnnnnnnnnnnnnnnnnnnnnnnnnnnnnnnnnnnnnnnnnnnnnnnnnnnnnnnnnnnnnnnnnnnnnnnnnnnnnnnnnnnnnnnnnnnnnnnnnnnnnnnnnnnnnnnnnnnnnnnnnnnnnnnnnnnnnnnnnnnnnnnnnnnnnnnnnnnnnnnnnnnnnnnnnnnnnnnnnnnnnnnnnnnnnnnnnnnnnnnnnnnnnnnnnnnnnnnnnnnnnnnnnnnnnnnnnnnnnnnnnnnnnnnnnnnnnnnnnnnnnnnnnnnnnnnnnnnnnnnnnnnnnnnnnnnnnnnnnnnnnnnnnnnnnnnnnnnnnnnnnnnnnnnnnnnnnnnnnnnnnnnnnnnnnnnnnnnnnnnnnnnnnnnnnnnnnnnnnnnnnnnnnnnnnnnnnnnnnnnnnnnnnnnnnnnnnnnnnnnnnnnnnnnnnnnnnnnnnnnnnnnnnnnnnnnnnnnnnnnnnnnnnnnnnnnnnnnnnnnnnnnnnnnnnnnnnnnnnnnnnnnnnnnnnnnnnnnnnnnnnnnnnnnnnnnnnnnnnnnnnnnnnnnnnnnnnnnnnnnnnnnnnnnnnnnnnnnnnnnnnnnnnnnnnnnnnnnnnnnnnnnnnnnnnnnnnnnnnnnnnnnnnnnnnnnnnnnnnnnnnnnnnnnnnnnnnnnnnnnnnnnnnnnnnnnnnnnnnnnnnnnnnnnnnnnnnnnnnnnnnnnnnnnnnnnnnnnnnnnnnnnnnnnnnnnnnnnnnnnnnnnnnnnnnnnnnnnnnnnnnnnnnnnnnnnnnnnnnnnnnnnnnnnnnnnnnnnnnnnnnnnnnnnnnnnnnnnnnnnnnnnnnnnnnnnnnnnnnnnnnnnnnnnnnnnnnnnnnnnnnnnnnnnnnnnnnnnnnnnnnnnnnnnnnnnnnnnnnnnnnnnnnnnnnnnnnnnnnnnnnnnnnnnnnnnnnnnnnnnnnnnnnnnnnnnnnnnnnnnnnnnnnnnnnnnnnnnnnnnnnnnnnnnnnnnnnnnnnnnnnnnnnnnnnnnnnnnnnnnnnnnnnnnnnnnnnnnnnnnnnnnnnnnnnnnnnnnnnnnnnnnnnnnnnnnnnnnnnnnnnnnnnnnnnnnnnnnnnnnnnnnnnnnnnnnnnnnnnnnnnnnnnnnnnnnnnnnnnnnnnnnnnnnnnnnnnnnnnnnnnnnnnnnnnnnnnnnnnnnnnnnnnnnnnnnnnnnnnnnnnnnnnnnnnnnnnnnnnnnnnnnnnnnnnnnnnnnnnnnnnnnnnnnnnnnnnnnnnnnnnnnnnnnnnnnnnnnnnnnnnnnnnnnnnnnnnnnnnnnnnnnnnnnnnnnnnnnnnnnnnnnnnnnnnnnnnnnnnnnnnnnnnnnnnnnnnnnnnnnnnnnnnnnnnnnnnnnnnnnnnnnnnnnnnnnnnnnnnnnnnnnnnnnnnnnnnnnnnnnnnnnnnnnnnnnnnnnnnnnnnnnnnnnnnnnnnnnnnnnnnnnnnnnnnnnnnnnnnnnnnnnnnnnnnnnnnnnnnnnnnnnnnnnnnnnnnnnnnnnnnnnnnnnnnnnnnnnnnnnnnnnnnnnnnnnnnnnnnnnnnnnnnnnnnnnnnnnnnnnnnnnnnnnnnnnnnnnnnnnnnnnnnnnnnnnnnnnnnnnnnnnnnnnnnnnnnnnnnnnnnnnnnnnnnnnnnnnnnnnnnnnnnnnnnnnnnnnnnnnnnnnnnnnnnnnnnnnnnnnnnnnnnnnnnnnnnnnnnnnnnnnnnnnnnnnnnnnnnnnnnnnnnnnnnnnnnnnnnnnnnnnnnnnnnnnnnnnnnnnnnnnnnnnnnnnnnnnnnnnnnnnnnnnnnnnnnnnnnnnnnnnnnnnnnnnnnnnnnnnnnnnnnnnnnnnnnnnnnnnnnnnnnnnnnnnnnnnnnnnnnnnnnnnnnnnnnnnnnnnnnnnnnnnnnnnnnnnnnnnnnnnnnnnnnnnnnnnnnnnnnnnnnnnnnnnnnnnnnnnnnnnnnnnnnnnnnnnnnnnnnnnnnnnnnnnnnnnnnnnnnnnnnnnnnnnnnnnnnnnnnnnnnnnnnnnnnnnnnnnnnnnnnnnnnnnnnnnnnnnnnnnnnnnnnnnnnnnnnnnnnnnnnnnnnnnnnnnnnnnnnnnnnnnnnnnnnnnnnnnnnnnnnnnnnnnnnnnnnnnnnnnnnnnnnnnnnnnnnnnnnnnnnnnnnnnnnnnnnnnnnnnnnnnnnnnnnnnnnnnnnnnnnnnnnnnnnnnnnnnnnnnnnnnnnnnnnnnnnnnnnnnnnnnnnnnnnnnnnnnnnnnnnnnnnnnnnnnnnnnnnnnnnnnnnnnnnnnnnnnnnnnnnnnnnnnnnnnnnnnnnnnnnnnnnnnnnnnnnnnnnnnnnnnnnnnnnnnnnnnnnnnnnnnnnnnnnnnnnnnnnnnnnnnnnnnnnnnnnnnnnnnnnnnnnnnnnnnnnnnnnnnnnnnnnnnnnnnnnnnnnnnnnnnnnnnnnnnnnnnnnnnnnnnnnnnnnnnnnnnnnnnnnnnnnnnnnnnnnnnnnnnnnnnnnnnnnnnnnnnnnnnnnnnnnnnnnnnnnnnnnnnnnnnnnnnnnnnnnnnnnnnnnnnnnnnnnnnnnnnnnnnnnnnnnnnnnnnnnnnnnnnnnnnnnnnnnnnnnnnnnnnnnnnnnnnnnnnnnnnnnnnnnnnnnnnnnnnnnnnnnnnnnnnnnnnnnnnnnnnnnnnnnnnnnnnnnnnnnnnnnnnnnnnnnnnnnnnnnnnnnnnnnnnnnnnnnnnnnnnnnnnnnnnnnnnnnnnnnnnnnnnnnnnnnnnnnnnnnnnnnnnnnnnnnnnnnnnnnnnnnnnnnnnnnnnnnnnnnnnnnnnnnnnnnnnnnnnnnnnnnnnnnnnnnnnnnnnnnnnnnnnnnnnnnnnnnnnnnnnnnnnnnnnnnnnnnnnnnnnnnnnnnnnnnnnnnnnnnnnnnnnnnnnnnnnnnnnnnnnnnnnnnnnnnnnnnnnnnnnnnnnnnnnnnnnnnnnnnnnnnnnnnnnnnnnnnnnnnnnnnnnnnnnnnnnnnnnnnnnnnnnnnnnnnnnnnnnnnnnnnnnnnnnnnnnnnnnnnnnnnnnnnnnnnnnnnnnnnnnnnnnnnnnnnnnnnnnnnnnnnnnnnnnnnnnnnnnnnnnnnnnnnnnnnnnnnnnnnnnnnnnnnnnnnnnnnnnnnnnnnnnnnnnnnnnnnnnnnnnnnnnnnnnnnnnnnnnnnnnnnnnnnnnnnnnnnnnnnnnnnnnnnnnnnnnnnnnnnnnnnnnnnnnnnnnnnnnnnnnnnnnnnnnnnnnnnnnnnnnnnnnnnnnnnnnnnnnnnnnnnnnnnnnnnnnnnnnnnnnnnnnnnnnnnnnnnnnnnnnnnnnnnnnnnnnnnnnnnnnnnnnnnnnnnnnnnnnnnnnnnnnnnnnnnnnnnnnnnnnnnnnnnnnnnnnnnnnnnnnnnnnnnnnnnnnnnnnnnnnnnnnnnnnnnnnnnnnnnnnnnnnnnnnnnnnnnnnnnnnnnnnnnnnnnnnnnnnnnnnnnnnnnnnnnnnnnnnnnnnnnnnnnnnnnnnnnnnnnnnnnnnnnnnnnnnnnnnnnnnnnnnnnnnnnnnnnnnnnnnnnnnnnnnnnnnnnnnnnnnnnnnnnnnnnnnnnnnnnnnnnnnnnnnnnnnnnnnnnnnnnnnnnnnnnnnnnnnnnnnnnnnnnnnnnnnnnnnnnnnnnnnnnnnnnnnnnnnnnnnnnnnnnnnnnnnnnnnnnnnnnnnnnnnnnnnnnnnnnnnnnnnnnnnnnnnnnnnnnnnnnnnnnnnnnnnnnnnnnnnnnnnnnnnnnnnnnnnnnnnnnnnnnnnnnnnnnnnnnnnnnnnnnnnnnnnnnnnnnnnnnnnnnnnnnnnnnnnnnnnnnnnnnnnnnnnnnnnnnnnnnnnnnnnnnnnnnnnnnnnnnnnnnnnnnnnnnnnnnnnnnnnnnnnnnnnnnnnnnnnnnnnnnnnnnnnnnnnnnnnnnnnnnnnnnnnnnnnnnnnnnnnnnnnnnnnnnnnnnnnnnnnnnnnnnnnnnnnnnnnnnnnnnnnnnnnnnnnnnnnnnnnnnnnnnnnnnnnnnnnnnnnnnnnnnnnnnnnnnnnnnnnnnnnnnnnnnnnnnnnnnnnnnnnnnnnnnnnnnnnnnnnnnnnnnnnnnnnnnnnnnnnnnnnnnnnnnnnnnnnnnnnnnnnnnnnnnnnnnnnnnnnnnnnnnnnnnnnnnnnnnnnnnnnnnnnnnnnnnnnnnnnnnnnnnnnnnnnnnnnnnnnnnnnnnnnnnnnnnnnnnnnnnnnnnnnnnnnnnnnnnnnnnnnnnnnnnnnnnnnnnnnnnnnnnnnnnnnnnnnnnnnnnnnnnnnnnnnnnnnnnnnnnnnnnnnnnnnnnnnnnnnnnnnnnnnnnnnnnnnnnnnnnnnnnnnnnnnnnnnnnnnnnnnnnnnnnnnnnnnnnnnnnnnnnnnnnnnnnnnnnnnnnnnnnnnnnnnnnnnnnnnnnnnnnnnnnnnnnnnnnnnnnnnnnnnnnnnnnnnnnnnnnnnnnnnnnnnnnnnnnnnnnnnnnnnnnnnnnnnnnnnnnnnnnnnnnnnnnnnnnnnnnnnnnnnnnnnnnnnnnnnnnnnnnnnnnnnnnnnnnnnnnnnnnnnnnnnnnnnnnnnnnnnnnnnnnnnnnnnnnnnnnnnnnnnnnnnnnnnnnnnnnnnnnnnnnnnnnnnnnnnnnnnnnnnnnnnnnnnnnnnnnnnnnnnnnnnnnnnnnnnnnnnnnnnnnnnnnnnnnnnnnnnnnnnnnnnnnnnnnnnnnnnnnnnnnnnnnnnnnnnnnnnnnnnnnnnnnnnnnnnnnnnnnnnnnnnnnnnnnnnnnnnnnnnnnnnnnnnnnnnnnnnnnnnnnnnnnnnnnnnnnnnnnnnnnnnnnnnnnnnnnnnnnnnnnnnnnnnnnnnnnnnnnnnnnnnnnnnnnnnnnnnnnnnnnnnnnnnnnnnnnnnnnnnnnnnnnnnnnnnnnnnnnnnnnnnnnnnnnnnnnnnnnnnnnnnnnnnnnnnnnnnnnnnnnnnnnnnnnnnnnnnnnnnnnnnnnnnnnnnnnnnnnnnnnnnnnnnnnnnnnnnnnnnnnnnnnnnnnnnnnnnnnnnnnnnnnnnnnnnnnnnnnnnnnnnnnnnnnnnnnnnnnnnnnnnnnnnnnnnnnnnnnnnnnnnnnnnnnnnnnnnnnnnnnnnnnnnnnnnnnnnnnnnnnnnnnnnnnnnnnnnnnnnnnnnnnnnnnnnnnnnnnnnnnnnnnnnnnnnnnnnnnnnnnnnnnnnnnnnnnnnnnnnnnnnnnnnnnnnnnnnnnnnnnnnnnnnnnnnnnnnnnnnnnnnnnnnnnnnnnnnnnnnnnnnnnnnnnnnnnnnnnnnnnnnnnnnnnnnnnnnnnnnnnnnnnnnnnnnnnnnnnnnnnnnnnnnnnnnnnnnnnnnnnnnnnnnnnnnnnnnnnnnnnnnnnnnnnnnnnnnnnnnnnnnnnnnnnnnnnnnnnnnnnnnnnnnnnnnnnnnnnnnnnnnnnnnnnnnnnnnnnnnnnnnnnnnnnnnnnnnnnnnnnnnnnnnnnnnnnnnnnnnnnnnnnnnnnnnnnnnnnnnnnnnnnnnnnnnnnnnnnnnnnnnnnnnnnnnnnnnnnnnnnnnnnnnnnnnnnnnnnnnnnnnnnnnnnnnnnnnnnnnnnnnnnnnnnnnnnnnnnnnnnnnnnnnnnnnnnnnnnnnnnnnnnnnnnnnnnnnnnnnnnnnnnnnnnnnnnnnnnnnnnnnnnnnnnnnnnnnnnnnnnnnnnnnnnnnnnnnnnnnnnnnnnnnnnnnnnnnnnnnnnnnnnnnnnnnnnnnnnnnnnnnnnnnnnnnnnnnnnnnnnnnnnnnnnnnnnnnnnnnnnnnnnnnnnnnnnnnnnnnnnnnnnnnnnnnnnnnnnnnnnnnnnnnnnnnnnnnnnnnnnnnnnnnnnnnnnnnnnnnnnnnnnnnnnnnnnnnnnnnnnnnnnnnnnnnnnnnnnnnnnnnnnnnnnnnnnnnnnnnnnnnnnnnnnnnnnnnnnnnnnnnnnnnnnnnnnnnnnnnnnnnnnnnnnnnnnnnnnnnnnnnnnnnnnnnnnnnnnnnnnnnnnnnnnnnnnnnnnnnnnnnnnnnnnnnnnnnnnnnnnnnnnnnnnnnnnnnnnnnnnnnnnnnnnnnnnnnnnnnnnnnnnnnnnnnnnnnnnnnnnnnnnnnnnnnnnnnnnnnnnnnnnnnnnnnnnnnnnnnnnnnnnnnnnnnnnnnnnnnnnnnnnnnnnnnnnnnnnnnnnnnnnnnnnnnnnnnnnnnnnnnnnnnnnnnnnnnnnnnnnnnnnnnnnnnnnnnnnnnnnnnnnnnnnnnnnnnnnnnnnnnnnnnnnnnnnnnnnnnnnnnnnnnnnnnnnnnnnnnnnnnnnnnnnnnnnnnnnnnnnnnnnnnnnnnnnnnnnnnnnnnnnnnnnnnnnnnnnnnnnnnnnnnnnnnnnnnnnnnnnnnnnnnnnnnnnnnnnnnnnnnnnnnnnnnnnnnnnnnnnnnnnnnnnnnnnnnnnnnnnnnnnnnnnnnnnnnnnnnnnnnnnnnnnnnnnnnnnnnnnnnnnnnnnnnnnnnnnnnnnnnnnnnnnnnnnnnnnnnnnnnnnnnnnnnnnnnnnnnnnnnnnnnnnnnnnnnnnnnnnnnnnnnnnnnnnnnnnnnnnnnnnnnnnnnnnnnnnnnnnnnnnnnnnnnnnnnnnnnnnnnnnnnnnnnnnnnnnnnnnnnnnnnnnnnnnnnnnnnnnnnnnnnnnnnnnnnnnnnnnnnnnnnnnnnnnnnnnnnnnnnnnnnnnnnnnnnnnnnnnnnnnnnnnnnnnnnnnnnnnnnnnnnnnnnnnnnnnnnnnnnnnnnnnnnnnnnnnnnnnnnnnnnnnnnnnnnnnnnnnnnnnnnnnnnnnnnnnnnnnnnnnnnnnnnnnnnnnnnnnnnnnnnnnnnnnnnnnnnnnnnnnnnnnnnnnnnnnnnnnnnnnnnnnnnnnnnnnnnnnnnnnnnnnnnnnnnnnnnnnnnnnnnnnnnnnnnnnnnnnnnnnnnnnnnnnnnnnnnnnnnnnnnnnnnnnnnnnnnnnnnnnnnnnnnnnnnnnnnnnnnnnnnnnnnnnnnnnnnnnnnnnnnnnnnnnnnnnnnnnnnnnnnnnnnnnnnnnnnnnnnnnnnnnnnnnnnnnnnnnnnnnnnnnnnnnnnnnnnnnnnnnnnnnnnnnnnnnnnnnnnnnnnnnnnnnnnnnnnnnnnnnnnnnnnnnnnnnnnnnnnnnnnnnnnnnnnnnnnnnnnnnnnnnnnnnnnnnnnnnnnnnnnnnnnnnnnnnnnnnnnnnnnnnnnnnnnnnnnnnnnnnnnnnnnnnnnnnnnnnnnnnnnnnnnnnnnnnnnnnnnnnnnnnnnnnnnnnnnnnnnnnnnnnnnnnnnnnnnnnnnnnnnnnnnnnnnnnnnnnnnnnnnnnnnnnnnnnnnnnnnnnnnnnnnnnnnnnnnnnnnnnnnnnnnnnnnnnnnnnnnnnnnnnnnnnnnnnnnnnnnnnnnnnnnnnnnnnnnnnnnnnnnnnnnnnnnnnnnnnnnnnnnnnnnnnnnnnnnnnnnnnnnnnnnnnnnnnnnnnnnnnnnnnnnnnnnnnnnnnnnnnnnnnnnnnnnnnnnnnnnnnnnnnnnnnnnnnnnnnnnnnnnnnnnnnnnnnnnnnnnnnnnnnnnnnnnnnnnnnnnnnnnnnnnnnnnnnnnnnnnnnnnnnnnnnnnnnnnnnnnnnnnnnnnnnnnnnnnnnnnnnnnnnnnnnnnnnnnnnnnnnnnnnnnnnnnnnnnnnnnnnnnnnnnnnnnnnnnnnnnnnnnnnnnnnnnnnnnnnnnnnnnnnnnnnnnnnnnnnnnnnnnnnnnnnnnnnnnnnnnnnnnnnnnnnnnnnnnnnnnnnnnnnnnnnnnnnnnnnnnnnnnnnnnnnnnnnnnnnnnnnnnnnnnnnnnnnnnnnnnnnnnnnnnnnnnnnnnnnnnnnnnnnnnnnnnnnnnnnnnnnnnnnnnnnnnnnnnnnnnnnnnnnnnnnnnnnnnnnnnnnnnnnnnnnnnnnnnnnnnnnnnnnnnnnnnnnnnnnnnnnnnnnnnnnnnnnnnnnnnnnnnnnnnnnnnnnnnnnnnnnnnnnnnnnnnnnnnnnnnnnnnnnnnnnnnnnnnnnnnnnnnnnnnnnnnnnnnnnnnnnnnnnnnnnnnnnnnnnnnnnnnnnnnnnnnnnnnnnnnnnnnnnnnnnnnnnnnnnnnnnnnnnnnnnnnnnnnnnnnnnnnnnnnnnnnnnnnnnnnnnnnnnnnnnnnnnnnnnnnnnnnnnnnnnnnnnnnnnnnnnnnnnnnnnnnnnnnnnnnnnnnnnnnnnnnnnnnnnnnnnnnnnnnnnnnnnnnnnnnnnnnnnnnnnnnnnnnnnnnnnnnnnnnnnnnnnnnnnnnnnnnnnnnnnnnnnnnnnnnnnnnnnnnnnnnnnnnnnnnnnnnnnnnnnnnnnnnnnnnnnnnnnnnnnnnnnnnnnnnnnnnnnnnnnnnnnnnnnnnnnnnnnnnnnnnnnnnnnnnnnnnnnnnnnnnnnnnnnnnnnnnnnnnnnnnnnnnnnnnnnnnnnnnnnnnnnnnnnnnnnnnnnnnnnnnnnnnnnnnnnnnnnnnnnnnnnnnnnnnnnnnnnnnnnnnnnnnnnnnnnnnnnnnnnnnnnnnnnnnnnnnnnnnnnnnnnnnnnnnnnnnnnnnnnnnnnnnnnnnnnnnnnnnnnnnnnnnnnnnnnnnnnnnnnnnnnnnnnnnnnnnnnnnnnnnnnnnnnnnnnnnnnnnnnnnnnnnnnnnnnnnnnnnnnnnnnnnnnnnnnnnnnnnnnnnnnnnnnnnnnnnnnnnnnnnnnnnnnnnnnnnnnnnnnnnnnnnnnnnnnnnnnnnnnnnnnnnnnnnnnnnnnnnnnnnnnnnnnnnnnnnnnnnnnnnnnnnnnnnnnnnnnnnnnnnnnnnnnnnnnnnnnnnnnnnnnnnnnnnnnnnnnnnnnnnnnnnnnnnnnnnnnnnnnnnnnnnnnnnnnnnnnnnnnnnnnnnnnnnnnnnnnnnnnnnnnnnnnnnnnnnnnnnnnnnnnnnnnnnnnnnnnnnnnnnnnnnnnnnnnnnnnnnnnnnnnnnnnnnnnnnnnnnnnnnnnnnnnnnnnnnnnnnnnnnnnnnnnnnnnnnnnnnnnnnnnnnnnnnnnnnnnnnnnnnnnnnnnnnnnnnnnnnnnnnnnnnnnnnnnnnnnnnnnnnnnnnnnnnnnnnnnnnnnnnnnnnnnnnnnnnnnnnnnnnnnnnnnnnnnnnnnnnnnnnnnnnnnnnnnnnnnnnnnnnnnnnnnnnnnnnnnnnnnnnnnnnnnnnnnnnnnnnnnnnnnnnnnnnnnnnnnnnnnnnnnnnnnnnnnnnnnnnnnnnnnnnnnnnnnnnnnnnnnnnnnnnnnnnnnnnnnnnnnnnnnnnnnnnnnnnnnnnnnnnnnnnnnnnnnnnnnnnnnnnnnnnnnnnnnnnnnnnnnnnnnnnnnnnnnnnnnnnnnnnnnnnnnnnnnnnnnnnnnnnnnnnnnnnnnnnnnnnnnnnnnnnnnnnnnnnnnnnnnnnnnnnnnnnnnnnnnnnnnnnnnnnnnnnnnnnnnnnnnnnnnnnnnnnnnnnnnnnnnnnnnnnnnnnnnnnnnnnnnnnnnnnnnnnnnnnnnnnnnnnnnnnnnnnnnnnnnnnnnnnnnnnnnnnnnnnnnnnnnnnnnnnnnnnnnnnnnnnnnnnnnnnnnnnnnnnnnnnnnnnnnnnnnnnnnnnnnnnnnnnnnnnnnnnnnnnnnnnnnnnnnnnnnnnnnnnnnnnnnnnnnnnnnnnnnnnnnnnnnnnnnnnnnnnnnnnnnnnnnnnnnnnnnnnnnnnnnnnnnnnnnnnnnnnnnnnnnnnnnnnnnnnnnnnnnnnnnnnnnnnnnnnnnnnnnnnnnnnnnnnnnnnnnnnnnnnnnnnnnnnnnnnnnnnnnnnnnnnnnnnnnnnnnnnnnnnnnnnnnnnnnnnnnnnnnnnnnnnnnnnnnnnnnnnnnnnnnnnnnnnnnnnnnnnnnnnnnnnnnnnnnnnnnnnnnnnnnnnnnnnnnnnnnnnnnnnnnnnnnnnnnnnnnnnnnnnnnnnnnnnnnnnnnnnnnnnnnnnnnnnnnnnnnnnnnnnnnnnnnnnnnnnnnnnnnnnnnnnnnnnnnnnnnnnnnnnnnnnnnnnnnnnnnnnnnnnnnnnnnnnnnnnnnnnnnnnnnnnnnnnnnnnnnnnnnnnnnnnnnnnnnnnnnnnnnnnnnnnnnnnnnnnnnnnnnnnnnnnnnnnnnnnnnnnnnnnnnnnnnnnnnnnnnnnnnnnnnnnnnnnnnnnnnnnnnnnnnnnnnnnnnnnnnnnnnnnnnnnnnnnnnnnnnnnnnnnnnnnnnnnnnnnnnnnnnnnnnnnnnnnnnnnnnnnnnnnnnnnnnnnnnnnnnnnnnnnnnnnnnnnnnnnnnnnnnnnnnnnnnnnnnnnnnnnnnnnnnnnnnnnnnnnnnnnnnnnnnnnnnnnnnnnnnnnnnnnnnnnnnnnnnnnnnnnnnnnnnnnnnnnnnnnnnnnnnnnnnnnnnnnnnnnnnnnnnnnnnnnnnnnnnnnnnnnnnnnnnnnnnnnnnnnnnnnnnnnnnnnnnnnnnnnnnnnnnnnnnnnnnnnnnnnnnnnnnnnnnnnnnnnnnnnnnnnnnnnnnnnnnnnnnnnnnnnnnnnnnnnnnnnnnnnnnnnnnnnnnnnnnnnnnnnnnnnnnnnnnnnnnnnnnnnnnnnnnnnnnnnnnnnnnnnnnnnnnnnnnnnnnnnnnnnnnnnnnnnnnnnnnnnnnnnnnnnnnnnnnnnnnnnnnnnnnnnnnnnnnnnnnnnnnnnnnnnnnnnnnnnnnnnnnnnnnnnnnnnnnnnnnnnnnnnnnnnnnnnnnnnnnnnnnnnnnnnnnnnnnnnnnnnnnnnnnnnnnnnnnnnnnnnnnnnnnnnnnnnnnnnnnnnnnnnnnnnnnnnnnnnnnnnnnnnnnnnnnnnnnnnnnnnnnnnnnnnnnnnnnnnnnnnnnnnnnnnnnnnnnnnnnnnnnnnnnnnnnnnnnnnnnnnnnnnnnnnnnnnnnnnnnnnnnnnnnnnnnnnnnnnnnnnnnnnnnnnnnnnnnnnnnnnnnnnnnnnnnnnnnnnnnnnnnnnnnnnnnnnnnnnnnnnnnnnnnnnnnnnnnnnnnnnnnnnnnnnnnnnnnnnnnnnnnnnnnnnnnnnnnnnnnnnnnnnnnnnnnnnnnnnnnnnnnnnnnnnnnnnnnnnnnnnnnnnnnnnnnnnnnnnnnnnnnnnnnnnnnnnnnnnnnnnnnnnnnnnnnnnnnnnnnnnnnnnnnnnnnnnnnnnnnnnnnnnnnnnnnnnnnnnnnnnnnnnnnnnnnnnnnnnnnnnnnnnnnnnnnnnnnnnnnnnnnnnnnnnnnnnnnnnnnnnnnnnnnnnnnnnnnnnnnnnnnnnnnnnnnnnnnnnnnnnnnnnnnnnnnnnnnnnnnnnnnnnnnnnnnnnnnnnnnnnnnnnnnnnnnnnnnnnnnnnnnnnnnnnnnnnnnnnnnnnnnnnnnnnnnnnnnnnnnnnnnnnnnnnnnnnnnnnnnnnnnnnnnnnnnnnnnnnnnnnnnnnnnnnnnnnnnnnnnnnnnnnnnnnnnnnnnnnnnnnnnnnnnnnnnnnnnnnnnnnnnnnnnnnnnnnnnnnnnnnnnnnnnnnnnnnnnnnnnnnnnnnnnnnnnnnnnnnnnnnnnnnnnnnnnnnnnnnnnnnnnnnnnnnnnnnnnnnnnnnnnnnnnnnnnnnnnnnnnnnnnnnnnnnnnnnnnnnnnnnnnnnnnnnnnnnnnnnnnnnnnnnnnnnnnnnnnnnnnnnnnnnnnnnnnnnnnnnnnnnnnnnnnnnnnnnnnnnnnnnnnnnnnnnnnnnnnnnnnnnnnnnnnnnnnnnnnnnnnnnnnnnnnnnnnnnnnnnnnnnnnnnnnnnnnnnnnnnnnnnnnnnnnnnnnnnnnnnnnnnnnnnnnnnnnnnnnnnnnnnnnnnnnnnnnnnnnnnnnnnnnnnnnnnnnnnnnnnnnnnnnnnnnnnnnnnnnnnnnnnnnnnnnnnnnnnnnnnnnnnnnnnnnnnnnnnnnnnnnnnnnnnnnnnnnnnnnnnnnnnnnnnnnnnnnnnnnnnnnnnnnnnnnnnnnnnnnnnnnnnnnnnnnnnnnnnnnnnnnnnnnnnnnnnnnnnnnnnnnnnnnnnnnnnnnnnnnnnnnnnnnnnnnnnnnnnnnnnnnnnnnnnnnnnnnnnnnnnnnnnnnnnnnnnnnnnnnnnnnnnnnnnnnnnnnnnnnnnnnnnnnnnnnnnnnnnnnnnnnnnnnnnnnnnnnnnnnnnnnnnnnnnnnnnnnnnnnnnnnnnnnnnnnnnnnnnnnnnnnnnnnnnnnnnnnnnnnnnnnnnnnnnnnnnnnnnnnnnnnnnnnnnnnnnnnnnnnnnnnnnnnnnnnnnnnnnnnnnnnnnnnnnnnnnnnnnnnnnnnnnnnnnnnnnnnnnnnnnnnnnnnnnnnnnnnnnnnnnnnnnnnnnnnnnnnnnnnnnnnnnnnnnnnnnnnnnnnnnnnnnnnnnnnnnnnnnnnnnnnnnnnnnnnnnnnnnnnnnnnnnnnnnnnnnnnnnnnnnnnnnnnnnnnnnnnnnnnnnnnnnnnnnnnnnnnnnnnnnnnnnnnnnnnnnnnnnnnnnnnnnnnnnnnnnnnnnnnnnnnnnnnnnnnnnnnnnnnnnnnnnnnnnnnnnnnnnnnnnnnnnnnnnnnnnnnnnnnnnnnnnnnnnnnnnnnnnnnnnnnnnnnnnnnnnnnnnnnnnnnnnnnnnnnnnnnnnnnnnnnnnnnnnnnnnnnnnnnnnnnnnnnnnnnnnnnnnnnnnnnnnnnnnnnnnnnnnnnnnnnnnnnnnnnnnnnnnnnnnnnnnnnnnnnnnnnnnnnnnnnnnnnnnnnnnnnnnnnnnnnnnnnnnnnnnnnnnnnnnnnnnnnnnnnnnnnnnnnnnnnnnnnnnnnnnnnnnnnnnnnnnnnnnnnnnnnnnnnnnnnnnnnnnnnnnnnnnnnnnnnnnnnnnnnnnnnnnnnnnnnnnnnnnnnnnnnnnnnnnnnnnnnnnnnnnnnnnnnnnnnnnnnnnnnnnnnnnnnnnnnnnnnnnnnnnnnnnnnnnnnnnnnnnnnnnnnnnnnnnnnnnnnnnnnnnnnnnnnnnnnnnnnnnnnnnnnnnnnnnnnnnnnnnnnnnnnnnnnnnnnnnnnnnnnnnnnnnnnnnnnnnnnnnnnnnnnnnnnnnnnnnnnnnnnnnnnnnnnnnnnnnnnnnnnnnnnnnnnnnnnnnnnnnnnnnnnnnnnnnnnnnnnnnnnnnnnnnnnnnnnnnnnnnnnnnnnnnnnnnnnnnnnnnnnnnnnnnnnnnnnnnnnnnnnnnnnnnnnnnnnnnnnnnnnnnnnnnnnnnnnnnnnnnnnnnnnnnnnnnnnnnnnnnnnnnnnnnnnnnnnnnnnnnnnnnnnnnnnnnnnnnnnnnnnnnnnnnnnnnnnnnnnnnnnnnnnnnnnnnnnnnnnnnnnnnnnnnnnnnnnnnnnnnnnnnnnnnnnnnnnnnnnnnnnnnnnnnnnnnnnnnnnnnnnnnnnnnnnnnnnnnnnnnnnnnnnnnnnnnnnnnnnnnnnnnnnnnnnnnnnnnnnnnnnnnnnnnnnnnnnnnnnnnnnnnnnnnnnnnnnnnnnnnnnnnnnnnnnnnnnnnnnnnnnnnnnnnnnnnnnnnnnnnnnnnnnnnnnnnnnnnnnnnnnnnnnnnnnnnnnnnnnnnnnnnnnnnnnnnnnnnnnnnnnnnnnnnnnnnnnnnnnnnnnnnnnnnnnnnnnnnnnnnnnnnnnnnnnnnnnnnnnnnnnnnnnnnnnnnnnnnnnnnnnnnnnnnnnnnnnnnnnnnnnnnnnnnnnnnnnnnnnnnnnnnnnnnnnnnnnnnnnnnnnnnnnnnnnnnnnnnnnnnnnnnnnnnnnnnnnnnnnnnnnnnnnnnnnnnnnnnnnnnnnnnnnnnnnnnnnnnnnnnnnnnnnnnnnnnnnnnnnnnnnnnnnnnnnnnnnnnnnnnnnnnnnnnnnnnnnnnnnnnnnnnnnnnnnnnnnnnnnnnnnnnnnnnnnnnnnnnnnnnnnnnnnnnnnnnnnnnnnnnnnnnnnnnnnnnnnnnnnnnnnnnnnnnnnnnnnnnnnnnnnnnnnnnnnnnnnnnnnnnnnnnnnnnnnnnnnnnnnnnnnnnnnnnnnnnnnnnnnnnnnnnnnnnnnnnnnnnnnnnnnnnnnnnnnnnnnnnnnnnnnnnnnnnnnnnnnnnnnnnnnnnnnnnnnnnnnnnnnnnnnnnnnnnnnnnnnnnnnnnnnnnnnnnnnnnnnnnnnnnnnnnnnnnnnnnnnnnnnnnnnnnnnnnnnnnnnnnnnnnnnnnnnnnnnnnnnnnnnnnnnnnnnnnnnnnnnnnnnnnnnnnnnnnnnnnnnnnnnnnnnnnnnnnnnnnnnnnnnnnnnnnnnnnnnnnnnnnnnnnnnnnnnnnnnnnnnnnnnnnnnnnnnnnnnnnnnnnnnnnnnnnnnnnnnnnnnnnnnnnnnnnnnnnnnnnnnnnnnnnnnnnnnnnnnnnnnnnnnnnnnnnnnnnnnnnnnnnnnnnnnnnnnnnnnnnnnnnnnnnnnnnnnnnnnnnnnnnnnnnnnnnnnnnnnnnnnnnnnnnnnnnnnnnnnnnnnnnnnnnnnnnnnnnnnnnnnnnnnnnnnnnnnnnnnnnnnnnnnnnnnnnnnnnnnnnnnnnnnnnnnnnnnnnnnnnnnnnnnnnnnnnnnnnnnnnnnnnnnnnnnnnnnnnnnnnnnnnnnnnnnnnnnnnnnnnnnnnnnnnnnnnnnnnnnnnnnnnnnnnnnnnnnnnnnnnnnnnnnnnnnnnnnnnnnnnnnnnnnnnnnnnnnnnnnnnnnnnnnnnnnnnnnnnnnnnnnnnnnnnnnnnnnnnnnnnnnnnnnnnnnnnnnnnnnnnnnnnnnnnnnnnnnnnnnnnnnnnnnnnnnnnnnnnnnnnnnnnnnnnnnnnnnnnnnnnnnnnnnnnnnnnnnnnnnnnnnnnnnnnnnnnnnnnnnnnnnnnnnnnnnnnnnnnnnnnnnnnnnnnnnnnnnnnnnnnnnnnnnnnnnnnnnnnnnnnnnnnnnnnnnnnnnnnnnnnnnnnnnnnnnnnnnnnnnnnnnnnnnnnnnnnnnnnnnnnnnnnnnnnnnnnnnnnnnnnnnnnnnnnnnnnnnnnnnnnnnnnnnnnnnnnnnnnnnnnnnnnnnnnnnnnnnnnnnnnnnnnnnnnnnnnnnnnnnnnnnnnnnnnnnnnnnnnnnnnnnnnnnnnnnnnnnnnnnnnnnnnnnnnnnnnnnnnnnnnnnnnnnnnnnnnnnnnnnnnnnnnnnnnnnnnnnnnnnnnnnnnnnnnnnnnnnnnnnnnnnnnnnnnnnnnnnnnnnnnnnnnnnnnnnnnnnnnnnnnnnnnnnnnnnnnnnnnnnnnnnnnnnnnnnnnnnnnnnnnnnnnnnnnnnnnnnnnnnnnnnnnnnnnnnnnnnnnnnnnnnnnnnnnnnnnnnnnnnnnnnnnnnnnnnnnnnnnnnnnnnnnnnnnnnnnnnnnnnnnnnnnnnnnnnnnnnnnnnnnnnnnnnnnnnnnnnnnnnnnnnnnnnnnnnnnnnnnnnnnnnnnnnnnnnnnnnnnnnnnnnnnnnnnnnnnnnnnnnnnnnnnnnnnnnnnnnnnnnnnnnnnnnnnnnnnnnnnnnnnnnnnnnnnnnnnnnnnnnnnnnnnnnnnnnnnnnnnnnnnnnnnnnnnnnnnnnnnnnnnnnnnnnnnnnnnnnnnnnnnnnnnnnnnnnnnnnnnnnnnnnnnnnnnnnnnnnnnnnnnnnnnnnnnnnnnnnnnnnnnnnnnnnnnnnnnnnnnnnnnnnnnnnnnnnnnnnnnnnnnnnnnnnnnnnnnnnnnnnnnnnnnnnnnnnnnnnnnnnnnnnnnnnnnnnnnnnnnnnnnnnnnnnnnnnnnnnnnnnnnnnnnnnnnnnnnnnnnnnnnnnnnnnnnnnnnnnnnnnnnnnnnnnnnnnnnnnnnnnnnnnnnnnnnnnnnnnnnnnnnnnnnnnnnnnnnnnnnnnnnnnnnnnnnnnnnnnnnnnnnnnnnnnnnnnnnnnnnnnnnnnnnnnnnnnnnnnnnnnnnnnnnnnnnnnnnnnnnnnnnnnnnnnnnnnnnnnnnnnnnnnnnnnnnnnnnnnnnnnnnnnnnnnnnnnnnnnnnnnnnnnnnnnnnnnnnnnnnnnnnnnnnnnnnnnnnnnnnnnnnnnnnnnnnnnnnnnnnnnnnnnnnnnnnnnnnnnnnnnnnnnnnnnnnnnnnnnnnnnnnnnnnnnnnnnnnnnnnnnnnnnnnnnnnnnnnnnnnnnnnnnnnnnnnnnnnnnnnnnnnnnnnnnnnnnnnnnnnnnnnnnnnnnnnnnnnnnnnnnnnnnnnnnnnnnnnnnnnnnnnnnnnnnnnnnnnnnnnnnnnnnnnnnnnnnnnnnnnnnnnnnnnnnnnnnnnnnnnnnnnnnnnnnnnnnnnnnnnnnnnnnnnnnnnnnnnnnnnnnnnnnnnnnnnnnnnnnnnnnnnnnnnnnnnnnnnnnnnnnnnnnnnnnnnnnnnnnnnnnnnnnnnnnnnnnnnnnnnnnnnnnnnnnnnnnnnnnnnnnnnnnnnnnnnnnnnnnnnnnnnnnnnnnnnnnnnnnnnnnnnnnnnnnnnnnnnnnnnnnnnnnnnnnnnnnnnnnnnnnnnnnnnnnnnnnnnnnnnnnnnnnnnnnnnnnnnnnnnnnnnnnnnnnnnnnnnnnnnnnnnnnnnnnnnnnnnnnnnnnnnnnnnnnnnnnnnnnnnnnnnnnnnnnnnnnnnnnnnnnnnnnnnnnnnnnnnnnnnnnnnnnnnnnnnnnnnnnnnnnnnnnnnnnnnnnnnnnnnnnnnnnnnnnnnnnnnnnnnnnnnnnnnnnnnnnnnnnnnnnnnnnnnnnnnnnnnnnnnnnnnnnnnnnnnnnnnnnnnnnnnnnnnnnnnnnnnnnnnnnnnnnnnnnnnnnnnnnnnnnnnnnnnnnnnnnnnnnnnnnnnnnnnnnnnnnnnnnnnnnnnnnnnnnnnnnnnnnnnnnnnnnnnnnnnnnnnnnnnnnnnnnnnnnnnnnnnnnnnnnnnnnnnnnnnnnnnnnnnnnnnnnnnnnnnnnnnnnnnnnnnnnnnnnnnnnnnnnnnnnnnnnnnnnnnnnnnnnnnnnnnnnnnnnnnnnnnnnnnnnnnnnnnnnnnnnnnnnnnnnnnnnnnnnnnnnnnnnnnnnnnnnnnnnnnnnnnnnnnnnnnnnnnnnnnnnnnnnnnnnnnnnnnnnnnnnnnnnnnnnnnnnnnnnnnnnnnnnnnnnnnnnnnnnnnnnnnnnnnnnnnnnnnnnnnnnnnnnnnnnnnnnnnnnnnnnnnnnnnnnnnnnnnnnnnnnnnnnnnnnnnnnnnnnnnnnnnnnnnnnnnnnnnnnnnnnnnnnnnnnnnnnnnnnnnnnnnnnnnnnnnnnnnnnnnnnnnnnnnnnnnnnnnnnnnnnnnnnnnnnnnnnnnnnnnnnnnnnnnnnnnnnnnnnnnnnnnnnnnnnnnnnnnnnnnnnnnnnnnnnnnnnnnnnnnnnnnnnnnnnnnnnnnnnnnnnnnnnnnnnnnnnnnnnnnnnnnnnnnnnnnnnnnnnnnnnnnnnnnnnnnnnnnnnnnnnnnnnnnnnnnnnnnnnnnnnnnnnnnnnnnnnnnnnnnnnnnnnnnnnnnnnnnnnnnnnnnnnnnnnnnnnnnnnnnnnnnnnnnnnnnnnnnnnnnnnnnnnnnnnnnnnnnnnnnnnnnnnnnnnnnnnnnnnnnnnnnnnnnnnnnnnnnnnnnnnnnnnnnnnnnnnnnnnnnnnnnnnnnnnnnnnnnnnnnnnnnnnnnnnnnnnnnnnnnnnnnnnnnnnnnnnnnnnnnnnnnnnnnnnnnnnnnnnnnnnnnnnnnnnnnnnnnnnnnnnnnnnnnnnnnnnnnnnnnnnnnnnnnnnnnnnnnnnnnnnnnnnnnnnnnnnnnnnnnnnnnnnnnnnnnnnnnnnnnnnnnnnnnnnnnnnnnnnnnnnnnnnnnnnnnnnnnnnnnnnnnnnnnnnnnnnnnnnnnnnnnnnnnnnnnnnnnnnnnnnnnnnnnnnnnnnnnnnnnnnnnnnnnnnnnnnnnnnnnnnnnnnnnnnnnnnnnnnnnnnnnnnnnnnnnnnnnnnnnnnnnnnnnnnnnnnnnnnnnnnnnnnnnnnnnnnnnnnnnnnnnnnnnnnnnnnnnnnnnnnnnnnnnnnnnnnnnnnnnnnnnnnnnnnnnnnnnnnnnnnnnnnnnnnnnnnnnnnnnnnnnnnnnnnnnnnnnnnnnnnnnnnnnnnnnnnnnnnnnnnnnnnnnnnnnnnnnnnnnnnnnnnnnnnnnnnnnnnnnnnnnnnnnnnnnnnnnnnnnnnnnnnnnnnnnnnnnnnnnnnnnnnnnnnnnnnnnnnnnnnnnnnnnnnnnnnnnnnnnnnnnnnnnnnnnnnnnnnnnnnnnnnnnnnnnnnnnnnnnnnnnnnnnnnnnnnnnnnnnnnnnnnnnnnnnnnnnnnnnnnnnnnnnnnnnnnnnnnnnnnnnnnnnnnnnnnnnnnnnnnnnnnnnnnnnnnnnnnnnnnnnnnnnnnnnnnnnnnnnnnnnnnnnnnnnnnnnnnnnnnnnnnnnnnnnnnnnnnnnnnnnnnnnnnnnnnnnnnnnnnnnnnnnnnnnnnnnnnnnnnnnnnnnnnnnnnnnnnnnnnnnnnnnnnnnnnnnnnnnnnnnnnnnnnnnnnnnnnnnnnnnnnnnnnnnnnnnnnnnnnnnnnnnnnnnnnnnnnnnnnnnnnnnnnnnnnnnnnnnnnnnnnnnnnnnnnnnnnnnnnnnnnnnnnnnnnnnnnnnnnnnnnnnnnnnnnnnnnnnnnnnnnnnnnnnnnnnnnnnnnnnnnnnnnnnnnnnnnnnnnnnnnnnnnnnnnnnnnnnnnnnnnnnnnnnnnnnnnnnnnnnnnnnnnnnnnnnnnnnnnnnnnnnnnnnnnnnnnnnnnnnnnnnnnnnnnnnnnnnnnnnnnnnnnnnnnnnnnnnnnnnnnnnnnnnnnnnnnnnnnnnnnnnnnnnnnnnnnnnnnnnnnnnnnnnnnnnnnnnnnnnnnnnnnnnnnnnnnnnnnnnnnnnnnnnnnnnnnnnnnnnnnnnnnnnnnnnnnnnnnnnnnnnnnnnnnnnnnnnnnnnnnnnnnnnnnnnnnnnnnnnnnnnnnnnnnnnnnnnnnnnnnnnnnnnnnnnnnnnnnnnnnnnnnnnnnnnnnnnnnnnnnnnnnnnnnnnnnnnnnnnnnnnnnnnnnnnnnnnnnnnnnnnnnnnnnnnnnnnnnnnnnnnnnnnnnnnnnnnnnnnnnnnnnnnnnnnnnnnnnnnnnnnnnnnnnnnnnnnnnnnnnnnnnnnnnnnnnnnnnnnnnnnnnnnnnnnnnnnnnnnnnnnnnnnnnnnnnnnnnnnnnnnnnnnnnnnnnnnnnnnnnnnnnnnnnnnnnnnnnnnnnnnnnnnnnnnnnnnnnnnnnnnnnnnnnnnnnnnnnnnnnnnnnnnnnnnnnnnnnnnnnnnnnnnnnnnnnnnnnnnnnnnnnnnnnnnnnnnnnnnnnnnnnnnnnnnnnnnnnnnnnnnnnnnnnnnnnnnnnnnnnnnnnnnnnnnnnnnnnnnnnnnnnnnnnnnnnnnnnnnnnnnnnnnnnnnnnnnnnnnnnnnnnnnnnnnnnnnnnnnnnnnnnnnnnnnnnnnnnnnnnnnnnnnnnnnnnnnnnnnnnnnnnnnnnnnnnnnnnnnnnnnnnnnnnnnnnnnnnnnnnnnnnnnnnnnnnnnnnnnnnnnnnnnnnnnnnnnnnnnnnnnnnnnnnnnnnnnnnnnnnnnnnnnnnnnnnnnnnnnnnnnnnnnnnnnnnnnnnnnnnnnnnnnnnnnnnnnnnnnnnnnnnnnnnnnnnnnnnnnnnnnnnnnnnnnnnnnnnnnnnnnnnnnnnnnnnnnnnnnnnnnnnnnnnnnnnnnnnnnnnnnnnnnnnnnnnnnnnnnnnnnnnnnnnnnnnnnnnnnnnnnnnnnnnnnnnnnnnnnnnnnnnnnnnnnnnnnnnnnnnnnnnnnnnnnnnnnnnnnnnnnnnnnnnnnnnnnnnnnnnnnnnnnnnnnnnnnnnnnnnnnnnnnnnnnnnnnnnnnnnnnnnnnnnnnnnnnnnnnnnnnnnnnnnnnnnnnnnnnnnnnnnnnnnnnnnnnnnnnnnnnnnnnnnnnnnnnnnnnnnnnnnnnnnnnnnnnnnnnnnnnnnnnnnnnnnnnnnnnnnnnnnnnnnnnnnnnnnnnnnnnnnnnnnnnnnnnnnnnnnnnnnnnnnnnnnnnnnnnnnnnnnnnnnnnnnnnnnnnnnnnnnnnnnnnnnnnnnnnnnnnnnnnnnnnnnnnnnnnnnnnnnnnnnnnnnnnnnnnnnnnnnnnnnnnnnnnnnnnnnnnnnnnnnnnnnnnnnnnnnnnnnnnnnnnnnnnnnnnnnnnnnnnnnnnnnnnnnnnnnnnnnnnnnnnnnnnnnnnnnnnnnnnnnnnnnnnnnnnnnnnnnnnnnnnnnnnnnnnnnnnnnnnnnnnnnnnnnnnnnnnnnnnnnnnnnnnnnnnnnnnnnnnnnnnnnnnnnnnnnnnnnnnnnnnnnnnnnnnnnnnnnnnnnnnnnnnnnnnnnnnnnnnnnnnnnnnnnnnnnnnnnnnnnnnnnnnnnnnnnnnnnnnnnnnnnnnnnnnnnnnnnnnnnnnnnnnnnnnnnnnnnnnnnnnnnnnnnnnnnnnnnnnnnnnnnnnnnnnnnnnnnnnnnnnnnnnnnnnnnnnnnnnnnnnnnnnnnnnnnnnnnnnnnnnnnnnnnnnnnnnnnnnnnnnnnnnnnnnnnnnnnnnnnnnnnnnnnnnnnnnnnnnnnnnnnnnnnnnnnnnnnnnnnnnnnnnnnnnnnnnnnnnnnnnnnnnnnnnnnnnnnnnnnnnnnnnnnnnnnnnnnnnnnnnnnnnnnnnnnnnnnnnnnnnnnnnnnnnnnnnnnnnnnnnnnnnnnnnnnnnnnnnnnnnnnnnnnnnnnnnnnnnnnnnnnnnnnnnnnnnnnnnnnnnnnnnnnnnnnnnnnnnnnnnnnnnnnnnnnnnnnnnnnnnnnnnnnnnnnnnnnnnnnnnnnnnnnnnnnnnnnnnnnnnnnnnnnnnnnnnnnnnnnnnnnnnnnnnnnnnnnnnnnnnnnnnnnnnnnnnnnnnnnnnnnnnnnnnnnnnnnnnnnnnnnnnnnnnnnnnnnnnnnnnnnnnnnnnnnnnnnnnnnnnnnnnnnnnnnnnnnnnnnnnnnnnnnnnnnnnnnnnnnnnnnnnnnnnnnnnnnnnnnnnnnnnnnnnnnnnnnnnnnnnnnnnnnnnnnnnnnnnnnnnnnnnnnnnnnnnnnnnnnnnnnnnnnnnnnnnnnnnnnnnnnnnnnnnnnnnnnnnnnnnnnnnnnnnnnnnnnnnnnnnnnnnnnnnnnnnnnnnnnnnnnnnnnnnnnnnnnnnnnnnnnnnnnnnnnnnnnnnnnnnnnnnnnnnnnnnnnnnnnnnnnnnnnnnnnnnnnnnnnnnnnnnnnnnnnnnnnnnnnnnnnnnnnnnnnnnnnnnnnnnnnnnnnnnnnnnnnnnnnnnnnnnnnnnnnnnnnnnnnnnnnnnnnnnnnnnnnnnnnnnnnnnnnnnnnnnnnnnnnnnnnnnnnnnnnnnnnnnnnnnnnnnnnnnnnnnnnnnnnnnnnnnnnnnnnnnnnnnnnnnnnnnnnnnnnnnnnnnnnnnnnnnnnnnnnnnnnnnnnnnnnnnnnnnnnnnnnnnnnnnnnnnnnnnnnnnnnnnnnnnnnnnnnnnnnnnnnnnnnnnnnnnnnnnnnnnnnnnnnnnnnnnnnnnnnnnnnnnnnnnnnnnnnnnnnnnnnnnnnnnnnnnnnnnnnnnnnnnnnnnnnnnnnnnnnnnnnnnnnnnnnnnnnnnnnnnnnnnnnnnnnnnnnnnnnnnnnnnnnnnnnnnnnnnnnnnnnnnnnnnnnnnnnnnnnnnnnnnnnnnnnnnnnnnnnnnnnnnnnnnnnnnnnnnnnnnnnnnnnnnnnnnnnnnnnnnnnnnnnnnnnnnnnnnnnnnnnnnnnnnnnnnnnnnnnnnnnnnnnnnnnnnnnnnnnnnnnnnnnnnnnnnnnnnnnnnnnnnnnnnnnnnnnnnnnnnnnnnnnnnnnnnnnnnnnnnnnnnnnnnnnnnnnnnnnnnnnnnnnnnnnnnnnnnnnnnnnnnnnnnnnnnnnnnnnnnnnnnnnnnnnnnnnnnnnnnnnnnnnnnnnnnnnnnnnnnnnnnnnnnnnnnnnnnnnnnnnnnnnnnnnnnnnnnnnnnnnnnnnnnnnnnnnnnnnnnnnnnnnnnnnnnnnnnnnnnnnnnnnnnnnnnnnnnnnnnnnnnnnnnnnnnnnnnnnnnnnnnnnnnnnnnnnnnnnnnnnnnnnnnnnnnnnnnnnnnnnnnnnnnnnnnnnnnnnnnnnnnnnnnnnnnnnnnnnnnnnnnnnnnnnnnnnnnnnnnnnnnnnnnnnnnnnnnnnnnnnnnnnnnnnnnnnnnnnnnnnnnnnnnnnnnnnnnnnnnnnnnnnnnnnnnnnnnnnnnnnnnnnnnnnnnnnnnnnnnnnnnnnnnnnnnnnnnnnnnnnnnnnnnnnnnnnnnnnnnnnnnnnnnnnnnnnnnnnnnnnnnnnnnnnnnnnnnnnnnnnnnnnnnnnnnnnnnnnnnnnnnnnnnnnnnnnnnnnnnnnnnnnnnnnnnnnnnnnnnnnnnnnnnnnnnnnnnnnnnnnnnnnnnnnnnnnnnnnnnnnnnnnnnnnnnnnnnnnnnnnnnnnnnnnnnnnnnnnnnnnnnnnnnnnnnnnnnnnnnnnnnnnnnnnnnnnnnnnnnnnnnnnnnnnnnnnnnnnnnnnnnnnnnnnnnnnnnnnnnnnnnnnnnnnnnnnnnnnnnnnnnnnnnnnnnnnnnnnnnnnnnnnnnnnnnnnnnnnnnnnnnnnnnnnnnnnnnnnnnnnnnnnnnnnnnnnnnnnnnnnnnnnnnnnnnnnnnnnnnnnnnnnnnnnnnnnnnnnnnnnnnnnnnnnnnnnnnnnnnnnnnnnnnnnnnnnnnnnnnnnnnnnnnnnnnnnnnnnnnnnnnnnnnnnnnnnnnnnnnnnnnnnnnnnnnnnnnnnnnnnnnnnnnnnnnnnnnnnnnnnnnnnnnnnnnnnnnnnnnnnnnnnnnnnnnnnnnnnnnnnnnnnnnnnnnnnnnnnnnnnnnnnnnnnnnnnnnnnnnnnnnnnnnnnnnnnnnnnnnnnnnnnnnnnnnnnnnnnnnnnnnnnnnnnnnnnnnnnnnnnnnnnnnnnnnnnnnnnnnnnnnnnnnnnnnnnnnnnnnnnnnnnnnnnnnnnnnnnnnnnnnnnnnnnnnnnnnnnnnnnnnnnnnnnnnnnnnnnnnnnnnnnnnnnnnnnnnnnnnnnnnnnnnnnnnnnnnnnnnnnnnnnnnnnnnnnnnnnnnnnnnnnnnnnnnnnnnnnnnnnnnnnnnnnnnnnnnnnnnnnnnnnnnnnnnnnnnnnnnnnnnnnnnnnnnnnnnnnnnnnnnnnnnnnnnnnnnnnnnnnnnnnnnnnnnnnnnnnnnnnnnnnnnnnnnnnnnnnnnnnnnnnnnnnnnnnnnnnnnnnnnnnnnnnnnnnnnnnnnnnnnnnnnnnnnnnnnnnnnnnnnnnnnnnnnnnnnnnnnnnnnnnnnnnnnnnnnnnnnnnnnnnnnnnnnnnnnnnnnnnnnnnnnnnnnnnnnnnnnnnnnnnnnnnnnnnnnnnnnnnnnnnnnnnnnnnnnnnnnnnnnnnnnnnnnnnnnnnnnnnnnnnnnnnnnnnnnnnnnnnnnnnnnnnnnnnnnnnnnnnnnnnnnnnnnnnnnnnnnnnnnnnnnnnnnnnnnnnnnnnnnnnnnnnnnnnnnnnnnnnnnnnnnnnnnnnnnnnnnnnnnnnnnnnnnnnnnnnnnnnnnnnnnnnnnnnnnnnnnnnnnnnnnnnnnnnnnnnnnnnnnnnnnnnnnnnnnnnnnnnnnnnnnnnnnnnnnnnnnnnnnnnnnnnnnnnnnnnnnnnnnnnnnnnnnnnnnnnnnnnnnnnnnnnnnnnnnnnnnnnnnnnnnnnnnnnnnnnnnnnnnnnnnnnnnnnnnnnnnnnnnnnnnnnnnnnnnnnnnnnnnnnnnnnnnnnnnnnnnnnnnnnnnnnnnnnnnnnnnnnnnnnnnnnnnnnnnnnnnnnnnnnnnnnnnnnnnnnnnnnnnnnnnnnnnnnnnnnnnnnnnnnnnnnnnnnnnnnnnnnnnnnnnnnnnnnnnnnnnnnnnnnnnnnnnnnnnnnnnnnnnnnnnnnnnnnnnnnnnnnnnnnnnnnnnnnnnnnnnnnnnnnnnnnnnnnnnnnnnnnnnnnnnnnnnnnnnnnnnnnnnnnnnnnnnnnnnnnnnnnnnnnnnnnnnnnnnnnnnnnnnnnnnnnnnnnnnnnnnnnnnnnnnnnnnnnnnnnnnnnnnnnnnnnnnnnnnnnnnnnnnnnnnnnnnnnnnnnnnnnnnnnnnnnnnnnnnnnnnnnnnnnnnnnnnnnnnnnnnnnnnnnnnnnnnnnnnnnnnnnnnnnnnnnnnnnnnnnnnnnnnnnnnnnnnnnnnnnnnnnnnnnnnnnnnnnnnnnnnnnnnnnnnnnnnnnnnnnnnnnnnnnnnnnnnnnnnnnnnnnnnnnnnnnnnnnnnnnnnnnnnnnnnnnnnnnnnnnnnnnnnnnnnnnnnnnnnnnnnnnnnnnnnnnnnnnnnnnnnnnnnnnnnnnnnnnnnnnnnnnnnnnnnnnnnnnnnnnnnnnnnnnnnnnnnnnnnnnnnnnnnnnnnnnnnnnnnnnnnnnnnnnnnnnnnnnnnnnnnnnnnnnnnnnnnnnnnnnnnnnnnnnnnnnnnnnnnnnnnnnnnnnnnnnnnnnnnnnnnnnnnnnnnnnnnnnnnnnnnnnnnnnnnnnnnnnnnnnnnnnnnnnnnnnnnnnnnnnnnnnnnnnnnnnnnnnnnnnnnnnnnnnnnnnnnnnnnnnnnnnnnnnnnnnnnnnnnnnnnnnnnnnnnnnnnnnnnnnnnnnnnnnnnnnnnnnnnnnnnnnnnnnnnnnnnnnnnnnnnnnnnnnnnnnnnnnnnnnnnnnnnnnnnnnnnnnnnnnnnnnnnnnnnnnnnnnnnnnnnnnnnnnnnnnnnnnnnnnnnnnnnnnnnnnnnnnnnnnnnnnnnnnnnnnnnnnnnnnnnnnnnnnnnnnnnnnnnnnnnnnnnnnnnnnnnnnnnnnnnnnnnnnnnnnnnnnnnnnnnnnnnnnnnnnnnnnnnnnnnnnnnnnnnnnnnnnnnnnnnnnnnnnnnnnnnnnnnnnnnnnnnnnnnnnnnnnnnnnnnnnnnnnnnnnnnnnnnnnnnnnnnnnnnnnnnnnnnnnnnnnnnnnnnnnnnnnnnnnnnnnnnnnnnnnnnnnnnnnnnnnnnnnnnnnnnnnnnnnnnnnnnnnnnnnnnnnnnnnnnnnnnnnnnnnnnnnnnnnnnnnnnnnnnnnnnnnnnnnnnnnnnnnnnnnnnnnnnnnnnnnnnnnnnnnnnnnnnnnnnnnnnnnnnnnnnnnnnnnnnnnnnnnnnnnnnnnnnnnnnnnnnnnnnnnnnnnnnnnnnnnnnnnnnnnnnnnnnnnnnnnnnnnnnnnnnnnnnnnnnnnnnnnnnnnnnnnnnnnnnnnnnnnnnnnnnnnnnnnnnnnnnnnnnnnnnnnnnnnnnnnnnnnnnnnnnnnnnnnnnnnnnnnnnnnnnnnnnnnnnnnnnnnnnnnnnnnnnnnnnnnnnnnnnnnnnnnnnnnnnnnnnnnnnnnnnnnnnnnnnnnnnnnnnnnnnnnnnnnnnnnnnnnnnnnnnnnnnnnnnnnnnnnnnnnnnnnnnnnnnnnnnnnnnnnnnnnnnnnnnnnnnnnnnnnnnnnnnnnnnnnnnnnnnnnnnnnnnnnnnnnnnnnnnnnnnnnnnnnnnnnnnnnnnnnnnnnnnnnnnnnnnnnnnnnnnnnnnnnnnnnnnnnnnnnnnnnnnnnnnnnnnnnnnnnnnnnnnnnnnnnnnnnnnnnnnnnnnnnnnnnnnnnnnnnnnnnnnnnnnnnnnnnnnnnnnnnnnnnnnnnnnnnnnnnnnnnnnnnnnnnnnnnnnnnnnnnnnnnnnnnnnnnnnnnnnnnnnnnnnnnnnnnnnnnnnnnnnnnnnnnnnnnnnnnnnnnnnnnnnnnnnnnnnnnnnnnnnnnnnnnnnnnnnnnnnnnnnnnnnnnnnnnnnnnnnnnnnnnnnnnnnnnnnnnnnnnnnnnnnnnnnnnnnnnnnnnnnnnnnnnnnnnnnnnnnnnnnnnnnnnnnnnnnnnnnnnnnnnnnnnnnnnnnnnnnnnnnnnnnnnnnnnnnnnnnnnnnnnnnnnnnnnnnnnnnnnnnnnnnnnnnnnnnnnnnnnnnnnnnnnnnnnnnnnnnnnnnnnnnnnnnnnnnnnnnnnnnnnnnnnnnnnnnnnnnnnnnnnnnnnnnnnnnnnnnnnnnnnnnnnnnnnnnnnnnnnnnnnnnnnnnnnnnnnnnnnnnnnnnnnnnnnnnnnnnnnnnnnnnnnnnnnnnnnnnnnnnnnnnnnnnnnnnnnnnnnnnnnnnnnnnnnnnnnnnnnnnnnnnnnnnnnnnnnnnnnnnnnnnnnnnnnnnnnnnnnnnnnnnnnnnnnnnnnnnnnnnnnnnnnnnnnnnnnnnnnnnnnnnnnnnnnnnnnnnnnnnnnnnnnnnnnnnnnnnnnnnnnnnnnnnnnnnnnnnnnnnnnnnnnnnnnnnnnnnnnnnnnnnnnnnnnnnnnnnnnnnnnnnnnnnnnnnnnnnnnnnnnnnnnnnnnnnnnnnnnnnnnnnnnnnnnnnnnnnnnnnnnnnnnnnnnnnnnnnnnnnnnnnnnnnnnnnnnnnnnnnnnnnnnnnnnnnnnnnnnnnnnnnnnnnnnnnnnnnnnnnnnnnnnnnnnnnnnnnnnnnnnnnnnnnnnnnnnnnnnnnnnnnnnnnnnnnnnnnnnnnnnnnnnnnnnnnnnnnnnnnnnnnnnnnnnnnnnnnnnnnnnnnnnnnnnnnnnnnnnnnnnnnnnnnnnnnnnnnnnnnnnnnnnnnnnnnnnnnnnnnnnnnnnnnnnnnnnnnnnnnnnnnnnnnnnnnnnnnnnnnnnnnnnnnnnnnnnnnnnnnnnnnnnnnnnnnnnnnnnnnnnnnnnnnnnnnnnnnnnnnnnnnnnnnnnnnnnnnnnnnnnnnnnnnnnnnnnnnnnnnnnnnnnnnnnnnnnnnnnnnnnnnnnnnnnnnnnnnnnnnnnnnnnnnnnnnnnnnnnnnnnnnnnnnnnnnnnnnnnnnnnnnnnnnnnnnnnnnnnnnnnnnnnnnnnnnnnnnnnnnnnnnnnnnnnnnnnnnnnnnnnnnnnnnnnnnnnnnnnnnnnnnnnnnnnnnnnnnnnnnnnnnnnnnnnnnnnnnnnnnnnnnnnnnnnnnnnnnnnnnnnnnnnnnnnnnnnnnnnnnnnnnnnnnnnnnnnnnnnnnnnnnnnnnnnnnnnnnnnnnnnnnnnnnnnnnnnnnnnnnnnnnnnnnnnnnnnnnnnnnnnnnnnnnnnnnnnnnnnnnnnnnnnnnnnnnnnnnnnnnnnnnnnnnnnnnnnnnnnnnnnnnnnnnnnnnnnnnnnnnnnnnnnnnnnnnnnnnnnnnnnnnnnnnnnnnnnnnnnnnnnnnnnnnnnnnnnnnnnnnnnnnnnnnnnnnnnnnnnnnnnnnnnnnnnnnnnnnnnnnnnnnnnnnnnnnnnnnnnnnnnnnnnnnnnnnnnnnnnnnnnnnnnnnnnnnnnnnnnnnnnnnnnnnnnnnnnnnnnnnnnnnnnnnnnnnnnnnnnnnnnnnnnnnnnnnnnnnnnnnnnnnnnnnnnnnnnnnnnnnnnnnnnnnnnnnnnnnnnnnnnnnnnnnnnnnnnnnnnnnnnnnnnnnnnnnnnnnnnnnnnnnnnnnnnnnnnnnnnnnnnnnnnnnnnnnnnnnnnnnnnnnnnnnnnnnnnnnnnnnnnnnnnnnnnnnnnnnnnnnnnnnnnnnnnnnnnnnnnnnnnnnnnnnnnnnnnnnnnnnnnnnnnnnnnnnnnnnnnnnnnnnnnnnnnnnnnnnnnnnnnnnnnnnnnnnnnnnnnnnnnnnnnnnnnnnnnnnnnnnnnnnnnnnnnnnnnnnnnnnnnnnnnnnnnnnnnnnnnnnnnnnnnnnnnnnnnnnnnnnnnnnnnnnnnnnnnnnnnnnnnnnnnnnnnnnnnnnnnnnnnnnnnnnnnnnnnnnnnnnnnnnnnnnnnnnnnnnnnnnnnnnnnnnnnnnnnnnnnnnnnnnnnnnnnnnnnnnnnnnnnnnnnnnnnnnnnnnnnnnnnnnnnnnnnnnnnnnnnnnnnnnnnnnnnnnnnnnnnnnnnnnnnnnnnnnnnnnnnnnnnnnnnnnnnnnnnnnnnnnnnnnnnnnnnnnnnnnnnnnnnnnnnnnnnnnnnnnnnnnnnnnnnnnnnnnnnnnnnnnnnnnnnnnnnnnnnnnnnnnnnnnnnnnnnnnnnnnnnnnnnnnnnnnnnnnnnnnnnnnnnnnnnnnnnnnnnnnnnnccgccgccagcccgctccccggcgacaccccgctttgctttcatccccgaaaccttcagccccgatccggcccgaccaccgccgccagcccgctccccggtgacaacccgcgccgcgatctcatccatcgggccgcgaagcgcccgccctttttactttcgtttccgaaacctaacggccccgatccggcccgcgccgccagaaggctcccgcgcccggcctgacgctccacaaaaaaaaggacggcccccgccgccacaacacaaaaaaaatattttcttccaaacccatcgaatactttcacccgcgcaaccaaattccccgacttccgaaagtccacaacccccaaatgaaagtattcggaaccgaagttatgacagaaccttacgttttttcagaccccccggtacatggtatcagcgaaatttatgaagccgtatttcttatcgccgaatccgggataaatcgtcgcgctaagacgttcctcgcatcttcagtcgtgtccgtgaaaaaaaaatgggggattagaacttgtaccctatgccgtcatactttgttccgtccgcggcaatgcaaggcgaacagcacccgctctgcccgtccccagcagcctcaaacagttcctcgcagtacggaccgcacgggcacggctcgtcaagatcatcgccttcgatatcaaaaatgcccgagccttccgcaacttgcatacttgtggccgtattatatccgctggtgttgacgattatgagtacggatcttttgtatccgagagcgacggagcatacgacgccgacgggtttatcaagaggattcagattggagagcaaagcgtagttccagccgggtttgtagttgccggagtaatcaggtccggaaactcctgaatattcgggggaacaaagctcgaacctctgttccgcagcgttgtcgtcccgaataaatgtcccctgaaaactgaatcctttttggcccagacattcgctgtcggacctgtcgcacaccgaagcgcaaagcccggaaggcgtgaaatccgccgagtacggatgcgacggcatcaccgtctgggcgacggccgtgtgcgaacaatccgcgtccgtcggaaaaaccttcattgccgtttcgttgatgtcgtccgtccttccgcactcagtcaaatcgacgatgggaaggaattccatcagggaagcgttgtccgtgccgatcaaggatctcacgggaaatcccttgcacgagttggcggcatcgttgatagccgtcttaagaacaagagtcgctcttatggcgtttctcactctcgttgacgcctgatactggtaatacgaaggcgtcatggcgcccatcaatatcagcattatgcacaaaacaacaagaatttccgccaaggtgaatcctttttcccggcgtcgcttgtttcgcattttttctccctgaatattattctgtttcaggcgcgcaataaaaaagcgcttcggctaactatggtattccccatttcgactggagtcaaacaatttgcccgtccgagaacgcgtgcgaatttgcctcataatgtatctatatcaataaaagtatacacccgcgcccaaaacactgtcaaacacagttcatttcagcggtttcgagttcaaagagcaaatgaaaacagaactaaaggctaaagattgagaatccgcgcaatccgctttcacgctgctggaccgcatttatcaccaatccgcgctggaactattctatgatatcaacccggcgggggactttatagggagcaagcgcagagcggagaaatttcctcagttcagccggttcagctgaggctccggagcgaagtttcgcttccgccataactctctctccgagggaatcgtccgggacgccgaagacgcggcagctttccaccgccggatgcgcgccgagcagcgcttccacctcctgcggatagacgttgaacccgccgacaagcacaagccttttcttatggccggttatgtatatatatccgtcttcgtctatgcgggctaggtcgccggagaacaaccaaccgtccttaagaaacatcgccgtgtcttcgggtttttcgagatattcgcgcatgacgttgccgccccggacgcaaagctcgcccgtatcgcccgtcgggagcgcctcgccgttctcatcgacgactttcacagttatgccttcaatcggcgggcctactgagccggctttcacaaactccctgccccgcatcgggttcaccgaagtcaccggcccgcattcagttatcccgtacccctgatatacatttgcgttgagtctctccacaagcccttcgtatagatcgtctgtcagaggagcgcctccgggaactatcgccctcacgaacgataggtcgctccccgccgagccgaatttatcaagcagccttttgtttatcgtcggcacgttcggaaaaacgcttatcttctcttttttaaggtccgccatcacgcgatcctctgaaaacatctcatgcagaacggtcttggcgcccgcgagaaaaggcagatgcagacatgtggtgcaggcgaacgcgtggaacaggggaatgacggtgagaaaagcgtcgtcttcatgcgccgccgccgtcgcgacgctcgaacgggcgttggtcatcagtcctagatgagttaggcaggctccgaggggatatcccctccatgcgttggtgtagatgatagcagccgtgtggttcggatctaggtccgcgggcgccggcgcggggaccgcctctgatatcgccttcttcatgtcgcgcttggccgggtcgcccatagaatcgctgtaaagcaacttcgttccggcgttcgcggcggcctccctgacgggcggctcgaacatcggatgcattatcgccagtttcgccgcgctatctttcagcatatattcaatctcgcgggcggaatacagcgggttgatagtgacgacctccaccccggccgcgaaggccccgtaaagagccacagggtattccggaacgttcggaatcgctatcgccatcctgtccccgcgcgacatgcccatctcgccgagcgcgcccgcaaacctcagcgcgtccgcgtaaagctgctcgtaccttatcactctgtcgtaaaaaacgaccgcgggccggtcgggaaaccgctccgcgctattttttagattgtccgcaaggttcataaaatcttattcctgttttccgggcgcgcgcgcacaccgcgccgcaaagcgccctttatacagtttccttattatgtgggtggaaattgcctctatcgaaaaaaaacgagggtcaagctcgcgatgcgaggtctttcaatagccagtcgacggcctctgacaggtcttctgcaatgaagtcgggttcgacgccttcgcgctccctgttgaactcccagtcgcctctgccgtatcccgtcaggacgagtatgcctgcggcgcagcccgcgcgcttcgccagcgccacatcgctgagcttgtcgccaatcatgtacgaacgggcaacgtccagtcccatttccgccgccgccctgtcaatcagtcccgtcttaggtttcctgcagtcgcagtccatcctgtaaggcggctctccggcggtcggatgatggggacaatagtaaatcccgtccagctttgcgccgcccacggccagcagctcgttcatgcgcgcgtggacatccgctatgagtctttcagggaaatagccgcgcgcgacgcccgcctgattggtgaccagaacagcgggcgctcctgcttcgttcagcttttttatcgccgaagccgacttttcgagcagcttgaaccggctgacatggttcacatagccgatctcctcgctcagagtgccgtccctgtctatgaaaacagcgggtattccgctcatcgcgcgcctcccggcagccgccgcgttttcaccgcgacctgtcgttttcctctataatatctttcatcctgaacacgagatcgagcgccttgcgcggagtcagctcttcggggtccgccgcgcggagcatttcctcgatgcggctcggaggctggtcgggaataagcgcgagttgcgccgtccgggcttcagggacttcgatgtccgactccgcttcctgagaaaccagaatttccgacgcgcggcgtatgaccgaggcgggtatgcccgccagtcttgccacctcgactccgaaactcctatccgtgccgccggggcgcaccttgtgcgtgaacagaatctccctgccccgctcaactgcggaaacgtggaagttctctatcctctcgaacaggtcggccatgcgcgtcagatggttgaaatgtgttgcgaatagagttctcgcgccaatcctctcgtgtatgtattcggagacggcccatgcgatgctaatgccgtctgcggcgctcgtgcctctgccgacctcgtcgagcagcacgaggcttttctttgtcgcgttagtcagaatcgtcgccgtctctaccatctccaccatgaacgtgctgaggccaagggtgatatcgtcgacagctccgaccctagtgaatatcctgtccaccacgcctatctccgccgcgcggcacggcacgaagctgcccatctgcgccatcagcgttatcagcgccacctgcctcatgtaagtcgattttcccgacatgttcggcccggtgatgatatgtatctggctcttcgagcaattgagcagggtgtcgttggggatgaatgtgcgcgcgggcatcgtcaggtccagcgacgggtgccggccttcttctatctttatcgtttccgacgcgctgacctgcgggcggcagtacctgttttcctccgccgcctgcgccagcgactgcaacgcgtccagcgccgccaccgcccgcgacgtcttcagcatccttccgatgtgccccgccagattgtcccttatcccgcagaacaactgatattcaagctcttcgagcctgctttccgctccgagtatcgcgaactctttttctttcagttcctctgtgtagaaccgctccgcgttggatgtggtctgtttgcgtatgtatctatcagggacgtttgccagattggccttcgtcacttcgatataataaccgaacactttgttgtagccgattttgagggatttgacgcctgtttcccttcgttctttttcttcgaggtcggcaatccatttccgtccgccttttttcagcgcgcgcagttcgtccacgcgggcatcgaagccgtcgcggatgatgccgccctcgcgggcggacctcggagcgtcgtcagaaacggcggcggcaaggtcggctcgcgcgtcttccagcgtgtccatgtcggcgcgcagggactccagcatgtcgcacttgaaagcggaggcgagggccgcgagcgcgggcagcgccgctagtgagtcgcgcactgccagcgtctccttgggcgtgattagcatggtggcgacccggctgcaaagcctctcgatatcccttacctcggaaaggctttcccttgcgccctcccgcgccgtcctgttttccagaagctcgccgacggcgtccagcctcaggtttatctccgccgggtcgttgagaggctgttcgagccagttgcgtatcagcctctttcccatcggcgtgagagtcctgtcaagcgcccacagaaggctccccttcttttccttctcgcgcatggtttccgtcagttcgaggttgcgccgcgtcgccgcgtccagatacatcccgtcgcggggccggtagagcgaaacggacatcacgtgcttggggtcggcgcgcaggttgtccctgacatagtccagaagctgcccggcggccattatcgcagcggggaactcctctatgccgaatccgagcagcgtcttcactccgaaatgcgcgcacagcctgtcccggtggtacggcgcgtcgaacatcaggtcaagctcggtgactttcacgtcgggaaaacgggccgatattctaccggcggcgtccgccccggaatcgcgcatcgccacgacgcattcgccgggcgacagccgctcgatctccctgaccagagacgaatcgtccgccgacctcgatatctcgcccgccttgaactccccggtcgaaacgtcgagtatccccagcccgaacctgtcgccggcgtccgccaccgaaagtatgtagttgtttcgcgatgagtccagcctgtccagatcgagatacgttccgggggtgacaaccctgacgacttcccggttgacgagtttaccggcgaccgcgtcctctgtctggtccgcgatggcgaccttgtgtccgcgctggatgagttttgccacgtaaccgtcggcggcgtgatggggcacgccgcacatgggcagtttgacgcccttgccgaactcgcgcgcggtcagcactatttccagttcggcggcggcggttttcgcgtcctcgccgaacatctcgtagaaatcgcccagccggtacatcaaaatggcgtccctgtggcgctccttgatggcggcgtactgctgatacataggagtggcgttcatacggcctctcccttcagggcgtgcggagacgctcccgtgatgcgggcaagcaactcatctcccggctcggccttaacgccttcgcgcacagtgaaatccactatcctgttctcccgcgtccgcccccgccgccgctctccgcccagagactcgaagaccatcgtttccgcgattccgcctacaaggctttcgttgatttccctcgatatattctcctgcaaatccaacagccgcgcaagccgcgacttcttggcgtcgagcggcgcgtcgtcggcctgcccggcggcggcggtccccggacgcggcgaatatttgaacgcgtacaactgatccacccgcgcgcgcgacgccagctcaagcgtccgctcgaattgctcttccgtctctccgggataccctactatcgcgtccgccgatatgccgcagcccggcgagtagtttcttatcatttctattgtttcgagataatacgccgcgtcgtatccgcgcctcatcctcctgagaatctcgtcgtcgccgctttggaacggcgcgtggaaatggccgcacgctttcggcagcgccgacagcccgcgcagaaactcctccgtcacccatttcgggtgcgacgttacaaaccttatccttgttacccccggcagatcgtggacggcggctatggcgtcgagaagggatcttttcggcgataagtccagcccgtaagcgagcacgttctggcctagaagaatgatttcccgcgcgccttcctccgcctttatcgcggcttccgctcgaacttgagccggagtcaggctggattccgcgccgcgcgcgtatggaaccacgcagtacgagcagaaattcgagcagccgcgcaccaccgtctggaaagcggacgccgggccgggggcaaacagagccgctcccgccgccaagccgggaaagttctcggccacagcctcccggatgatgtccgcgtagtcctgcggcctgcccgccccgacgacgtagtccacgtcgcgaatttccgcgcggatgtcggccagttcggcggagcatcctcccacgccgacgacgacgggcgcgccgccagtctttttgcgattgcgcaacacgcctatgaagctcagagccttctcctcggctttgcgccgcacgctgcacgtgttgacgtgaaccagcgaggcatcttcgggcgtcgccgcctccgccatgcccatcgagcgcagcatccgcgcgagcgacgccgagtcgtccatgttcatctggcaaccgaatgttttaatgaaaaatttgggagggcctgtctccgccatgaagatcagcctttcaactccctgaaaaagcaggaccatgctcctgtgtggcaggccccctcgccgctctgctcgacaatgaccagaagcgcgtcggagtcgcagtcgtacatcacctttttcactttttgaaaattgcccgaggtcgcccccttgttccagaactcgctgcgcgagcggctccagaaccacgtcgtgcccgtctcgatcgtccgccgcacggactcctcgttcatgtacgccaacataaggacgtccccgcttttttcatcctgaacgatagccgggataagccctttttcatcgaatttcaaatccatgtcgaaaccttctctcttggcgcaatgaggtcacagcctcatcgcgattcccctgtcccgcagatattcctttgcctgccttatggtgaaaatcccgtagtggaacagagaagcgaccaataccgcgtctgtcctgccgtcatgtatcgcgtcgtagaggtgagaaagctcgcccgctccgcctgacgctatcacagggattctcaccgcggtggagatggcgagattcaactcgttgtcataaccgattttcgtgccgtccctgttcatgcttgtgagcaggatttcgcccgcgccgcgccgttccgcctcgaccgcccagcccaccgcgtctatttcggtcggttttctgcctccgtgcgtgtagaccacccagccgtcgcccactcgcttcgcgtcgatcgcgaccactatgcactgcgctccgaaaatttcggatgactcgtttatcagactgggattcaggacagccgcagtgttgagcgacaccttgtccgcgcccgcgctcagcagttgccggatggtggcgacgttagtaatgccgcccccgacggtgaacgggatgaataccgtctccgccacccgtctgaccacatcgagcattatgtggcgcttgtccgaagaagcggtgatgtccagaaacaccagttcgtcggcttcggcttcctcgtatttttttgcctgctcgacagggtctccggcgtccacaaggttcacgaagttgacgcctttgacgacgcgcccgctgtcaacgtccaagcagggtattatccttttggcaagcaaaacgccctccgcgccgcctactgcggaaatctttcgacggcggccttgagatcgaagtcgccggtgtacagcgcgcgcccgatcaccgctccgtcaaggttcggtttttcaagagcggcgagccgctcgacatgctccacgcgggacaccccgccggcgcacaccaccgggatttccagagcgtccgccgcctgcgacatcatgtcgaaattcggctccgtcagcatcccgtcccgcacgatatctgtaagtatgattagtttagcgccgtcgtctcgcatcctgaggcacgcctctatagttactatttcagattcgtccgtccagccccggagagcgactttgccgcccttcgagtcgatggacaccgcgaccgcggcgccgaactcggagaaaagccccttggcaaaatcccgcgattcgagaacggacgtgccgactatgacgcgggaagcgccctcgtccagccagcgccggacgtcagcagccgaacggacgccgccgcccacctgcgtcctgattcccggcgacgcctcgaatatggcctttgcggcgtccaaattggaaaaacatttctggtcgagcgcggcgtcgagatcaatcacatgcagccacttcgtcccctcccgcgcccaccttatagccatttgctccggcctctccgaatacaccgtgcaaagctccctcttgccctgcgtcagccgcacgcatttgccgtccatcaaatctatcgccggatataaattcatcccttcgccatcctcccgaaattctcaagcagcttcatccccatcctctggcttttctcagggtggaactgcactgcggtcacattgtcgcgcgttatcgacgaaacgaactcgccgccgtaatccgtgacggtcatcgccagcgccgggtcctccggctcgacgagaaacgagtgcacgaaatagaagaacgagccgtcgggtattccatcagcgaccggccctctgttcctgaactcgagctggttccaacccatgtgcgggattttgaggtctcctctgaagcgagtcgccttgcccggaaaaacgccgaggccggggatgcgctctccttcttcgctgtagtcgaaaagcatctgcagtccgaggcatatccccaagaacggcttgccggatttgatttcagagacgattagccccgcaagcccctgcgattccaagtttttcatggccgccgcgaacgcgccgacgcccggaagaaccactcccgcagcgtcccggacgtcctttgcggaggtggtcacgcgcgcgtccgcccccacccgctcgaacgccttctgcacactcctcaaattgcccattccgtagtccacaatcgcaatcatgccaaatagtgtaggagttcgatatttatgtgtcaaacgatgacgtccgggcgcggcgcgtcactgattgagtttttctagggtttcaatgaatgagtctatgttgatgggtttcgaaaccgcgccgtccgctccgatctcgcgagcgagagcctcgatccgggcgcgcggcatcgcgctgaacaggaacaccatgggagccggagccgggccgctcttaatctttccgcacagttccgcgccgcttagccccggcaactgcacgtccaacatcacaagttgcggatcaaaagccgccatctcctcgaacaactctgtttcattcgacgccaccgcaacgtcgaatccttcggaaagcagcatcgtcttcaccaagtccaacaggtcgccgtcatcgtccacaaccagaatcctgttcaccctgcgcgattccacatgctccacagtctttagaatcggaatagtgaacgagaacgtcgagccttctccgggaaccgattcgacttttatccgtcctccgtgcgcctcaatgaactccttgacaatgcttagaccctttcccactccgtccgaaacaggatgcgagcctttcctgacttggaagaaaggcttgaaaatgttcttcaggtcagcggacgcgattccgatccctcggtccgaaacgcttatctccacgaaaccgtcctcgcgggtcgccgacacggcgaactgcagcctctccggcgtcgaatacttcaccgcgttttctattaggttgtccagcgtctgccgaattctgccatcgtcgcatttgacgatgacgcctttcagcgattcggacacctccttcttgaaggagtattccgacgttcggaacctgcgccggacgatgctctctatcataaggcgcgtttcgttcagccgcgcctcgaggaagttgtatatgttgatctcggccatatcgtaggtcgtcgttccgctctcgaatgcgtccagcgtgataagctcttcgaccagcttgagctgctgccggcctctttcgttgatggttttgattttctttttggcggcgtgcggcagatcctccttgagcaacatctcgctatatccgagtatcagcgacagcggcgtcctcagctcgtgagatattgaactgaggaagttaatcttttcctgctctatcctcttcctgtcggttatatcgcgcgatatgcccagcacggaggacacccgaccgtcgggggatttgatgggaacaagcctcgaacccagccagaactcccggtcgggaaactgcgtgacggtttctatgtagaacgattctccggattcaaaaaccctgtcgaggctctttttctgcctgtcggcgtccggcgagccgaacaactccgctcttgtaacccctatcgtctgttccggagtcatgccaagttgacgcgcggcgaaactattggtgtatctcacgatgtcgtctcgatcgactatgaaaatgaagtcttcggcggcttccgccagagtccggtatctctcctcgctctccctgagcgcctcttccgcctctttcatcccggttatgtccacatccatacagatgaactctttgtttccgtcccctacgtctatcggaaatatcatagaatacactacgacgctggagccgtctttcttgttgcaaatccattcggacgggccggaaggaaggttgctttcattcatctccttaagcagaatgtgaaaagcctcggttgccgcagagtcgagagtcgctccttccagagttctccctatcatctcctcggcggaccatccgaaaaccgattccgccgcgttgttccagtaaataacccggccctcgacatcgtatccctcgaccgccacgttcggcgtgttgcttatgatggcgtccaacctttgttcgctccgtttgagcgcggtttccgcttgatgcctcataagcgcgttggcgaatatctccgccaccaccgacagcaacgcgctgtggtccctcttccatcttcttctggtcttcaccgaatcaagccccatgaatccggaaagcttttcgttggaatacagggggaacataatcagcgacttgatgttttgcgcgttgaaaatgcttttttcaacttcagcgttttcaggaatcgcggacacatcgtctatagctatggtttctcccctgatgaacttgggcatcagccatttgagcgtttccaacggaatatttttgctgttctcaatctcggagctgattccctccgcgcaccattcatgcgtgttatcgacgaacaatccgtcgtcggtaagacggaacagatagctgcgatcgacctgcaggaattccccgagccttgtgagcgcgtcattcacggccgaatctatattctccgccccgacgcccacgaaactcgccgatatatccataacgacgctctggaagtcgaagttgtagcgcaacgcctcttccgcccgccttcgcgtcgtcacgtctctcatcaccgtcacaactctggcgacggcgtctttttcgaatatcggtatcttgcgggtctccgttattatcgtttccccgtcgatttcgttgatctcttcggaaagcatcatgttgccgctggtgaaaaccgatttgtattcctcccggacggagtcatcgagaaaagaaaaaacatcgaaaacgttccggcccgcgatgtccgtcggcaaaccgctttgcgcgttccattccttcatagttttgttgaaaagaacgatgttgaaatttctgtcgacgacatgaatcgcgtcggccatcgagtccatagtaagtctatacctcagttcggactccctgagcgattgttcggcgcgtcggcgctgtgtaatatcgcgcacgaccgatatgaccgtcctgttcggcgaattcaaatcgcctttcagcgagtgtattgcctcgaaatacatctccccgtccgcatatggcagagaatacgtcgcggcggatttctcgcccgtctcgaatgttttgttgaccgccttgtttagcgcttccgcggcttccggaggcagcacgtctgttggtttttttccgataaaagcctcgggcggcgcgtagagcctgtctgatctcgaagcatggtagccgactattcgcccttcaagattcacttcgaataatatatccggcatcgccttcagagtggtctcaaggcgatccctcgaatccctcagatcttcctccatgcgccgccggttcgagatttccttcctcaactcttcaataacttcgctgaactccgccgtgcgttccttcactgtttcctcaagcctttcttgatggctgagcagttgttcctctgccttccttctctccgttatgtcagtgatgaccgcgaaactgcctgaaaaccctcccacagcgtcgaaaagagggttggcagacacgagcgaatgcagaggcgagccgtcagaccgggtgaacgtcaactcgtattttccgccctcgccgagctttctccttgagaattgttttttaaatagggccaaattattcgcgtcgaggaaatttgttatcgactttccaacgactccgccgcgttcgcgcccgagcatttccaacgcgcggttgttcgcatacgtcatggctcccttttcgtctaacaccgttatgccgtcgtacatggtttctactatgagcctgaaatactcctctctctccctcagggcgttttccatctttatctgttccgtcatatctcttatgacgccctgatatccaacgaccgagccgtccggcccacggcgcgcggtcgcagttattttgcagtctatctcgcgtccgctcttgtgcctgagtttgacgtcgtaattcctgacggagccgcgggtctcaagcgcagtctgaagcggctcgcgatctctttcgtccacgtatgtcttcaacacatttctatttactatttcttctctctcatagccgagcagcgaaagcgccgcctgattggcttccagcacaatgccttcccgcgtcgatacgtacacagcgtccagagactgctcgaacagcgctttgtatctgtcctcgctctccctgagcgcctccaccgcctctttttgtctagtaatgtctatcccgaacacggtgattccggactgctctccgttttcatatatcgggaacgaattgttgatcacatgcctgatttctccagaggccgtcttgattcttgaaacgattatgtcctgtttccccgccatccctctggcgagcgtgtcaatctccattttcacatccgcaaccggcacgaactcggtcacgtgtttccccaaatcggccctcgtgtaaccgtacatctccagaacggcggtgtttgcgtatgcgacttttccctgcatgtctatttcaatcatcagaacggggatgttttcagcgatttctctgaaagctgccgagtcgattcgccccgacagacttgtcggaggcggatatgaagagttatcgggggacgattccagccgcgcgcgcaactccgcgacctgcttctccaactcttcgtatgtgggcttcttttcaggcatattcttattatattctttccggcttccgtcccgcgcgcggcctaaaatatcgcgcgctatctcaggaacataaacgccgaaatggcaaggcccgccacggccagcccccatgtccatgccagcgttttccgggtgaagacctgaacgtcctctcccagaaaacccgcgatccagacattgtgcgtgttggtcgggtcgctcacgccctgaatcatccccaccgagtagaacgccgcgactaccgccatcggcggcagcgcgccggtggaaatcattatcgccgctatccctattcccatgccccacacgttcaaaggcccccggtacaaagccaacggcgcgagcgcggtgaaaacaatcacgtagagaaccggcgcgctcggcgctatccgcctcatcacaggctccatgtatgcgccgaccgccgggtcccacacaacgcgtatcaccatgcctatccctatgattagcgccaccacgggagcgacgcccgttatcccgtcgaacaccgctttcgtcaacctctgaatcctgccgttcgggccgcggccggacacgatcaggcagtacagcattcccgcaagcagcgccgtgtttatcgggaacgcgtatcctgcgccgcctctcaaccggctggcaatgttgaatcccagaacgagagagagaggaataagcggcgtgagaaccgccagaatcccggcccgccccgcgtcccctgccgccgccgcgcctcctcccggcggaaccgcccagaaggatgtgtgaccccgacgtccgtgcaaaatgataaaaccgaggaccaccagcgcgaacgggatcatgaaaggcagaataaaacctatcaactgattctgagcgtcgatcgcgctcactgtcgagcttgccgtcattatctcagtgtaaaacttccagttgaccgggttcaacgctccgccgaggctcattccgaacaggaacagagagcctgcgactgcgggagtcacgccgatgctcatgaggatcggcagcattatagacgccaccataatgaccgctccgaggcccaccaatgacgagaataacagcgccgtcacgccggtcagcagcacgcacgacacgatcttgttgtcgccgcccagttcggacgcccatctgatgatcgtcgtggttgctccgctcgacttgagcagttcggcgagcgccgcgccgagcacgactgtaataaccaccggccacagcctcggcattccctcttctatcacaactctgaaaaattcccgcgccagaacgacggcgttcgatcccggatagctgaatgaaaggccgtggtagaaagctccgcccacgatgtacagcgtcgcggccatcagcggcaacgctatcagcgcgggcagtttccccagatacatcagcgccgcgaaagccagaaacactccgaacagagcaagccctaccgccatttccattcgcgttcacctttgttgattagtctattccgcgacttcgcggagcggcgagtctcatttctcgccgttctcggattgcggccccggataagacgatcttttgataatcaccgacgctatcctccgcccgaccatccgttccactttcatctcgtaaccttcgatatcgactgtctcttcctgtttgggaactttgcccatcgtatgaaaaatcaatccgcctagcgtttcgaactcttcgtcgtcgttgaactccgcgtcgagaatttcgttcagttccgcgatgtcgatcctagcgtccacgcgcaaagtgtccgagtccacccatctgtaaagaggctcttcggtgtcgtactcgtcccatatctccccgacgatttcctcaaggaggtcttcaatcgtcactagtcccgccgtgcatccgtattcgtcgatgactatcgccagatgcgtccgcttcttctgaaaatcatgaaggagatcatccaccatcttggattccggcacgaaataagccttgtggacgtaatctttcactgggtccgagtcgcgtccgtctttcagagcgcgcaacagagtccttgagttgaccacgccgatgacgttgtcctccccgccttcgtaaatcggaatgcgggaatgcttgtgctcttccatcagaaccgccatgcggtccaccgtagtgtccgccggagccatccgcatgtccggcctcggcgtcatcacttccctcacctgcgtttcgccgaattcgaccacgctgcgtatcatttctctttcagttttgtctatgatgccctgctctccggcatcgtccacaattcccagaatctccgactgggtgatgaacgggccttccgccgggcctgacttcccggtaaatatcctgagcgtcagattggctatcatcacgaacactttgcctatcggcgacacaatagcgtgaaacgtcgaaatcggcttgatcatttttatgaccacgcggtccgaactgttatatccgaccatcttcggaagtatttcgcagaaagcgattatcacaaacgacgccaccccgaaacttatggcgggaccgacccatgaaggccaatcagtgtgccccagcagttcttcggttatgttttcggtcattatcgcggccagcaggtttacgccgttaagacctattaaaatcgaagtgagcatgttgtttggtttggtcaaccagttgtcgatcgctcccgctcgcgcggggtgctcctctttgagggccttgagccggtgcctgctcatcgtcaccagagccgtctcggacgccgaaaagagcgcgctagccaacagcagtgcgaaaagaacaattatcgccagagtcattattttctcccagcgtcatattagaataacaaaaaatcaatgtcaaacatcgccgtctccgcgcgctaccgtgtccgccgtcaacagctccgcccggaataaacgcctcaactctacggctgtcaccctcgccgctcccgccgtcgcgctccgctgcgccaacatggcggacatgaattttatgagcggaaccgaaggcagcctgttgcgtttgcgcagacgagcaagaacgaaaaagaaaagaatcgctccgtgaaaaatggcggccctcaaaaatgcggcagctccaagcggcaaccccttcacggccacgccggtcagatgtatatacacttcctcgacgcccagcttccgcgccttgccgctcgtgcttgccgaatagcgatgtctaactttcgcgccgggcgcgtagaaacacttgcggcccgcaagagccgcccgaaggttcaaatccgtgtcctcgtaatacgcgaagaaattctcgtcgaacagccctatctcgtcgaacagcgatttcctgtagagcgccgcggccgcgcatggcccgaacacccgcgccggaaggttgtaatcccccccgtctctctgtccgcgcccccggttggagacggctccccacggcgcgtactcatcccccgccgagtcgattgttttagggtcgtcgtaaaaaactatcttgcacgcgaccgaatcgaagccgtgattagaatccagcgccgcgaccgctttttcgagccagtccgggtctggaaccgcgtcgttgttcagcagcgccacgaactcggtgtccgccgcgcggatgcctttgttcaccgcgcgggcaaatccctcattggcgctcgattcgattaattccacgtcgggatgattgttttttattatttcgcgggagccgtcccgcgacgcgttgtctatcacaataactcgctgcccgcccagagtctggctcgcgagcgcgccaagacattcgccgatatatttctctccgttccagttcgggatgacgactgtgacgcgttgcgggttgtccatcgagttcgcgctccggcgcggcgcgggcgttccgccgcccttgcctgccgtgttcaggttgttcttctctgcggctgtttctgtatgcccgtcatcagctccaacagatagtccctgtccatagacttgttcatcgcgtcctctttggtgatgatgtttttcttcatcaactcataaagggcttgttcgagagagagcatgccgatgttctttcccgtttgaatggaagcggggagttggtaggtttttccgtcgcggatgaggttgcgcagcgcccctgtgggaaccattatctcgaatgctgcgacgcgcccgcgccctgccgccctgcggaccagagtctgcgagattatcccctcgatgttctgcgacacctgcatccttatctgcgactgctgttcgggaggaaaaacgtcgatgatgcggtcgaccgtctgggccgcgcccgtcgtgtgtagcgtgccgagcacaaggtgccccgtctcagcggtggtgatcgcggtggaaatggtctcaagatctctcatttcgccgataagcaccacgtccgggtcctgtctgagcgcgctcttcaacgccgccgagaacgaccctgtgtcccgtccgacttcgcgctgattgacgaggctcttcttgttctggtggacgaactctatcggatcctcgatcgttattatatgttcttcgcgggtcgcgtttatgtggtctatcattgccgctagagtggtggacttgccgctccctgtgggtcctgtcactaggataagcccgcgcgggcgctcgcagaacttcttcaccaccggcggcaggctcaagtcctctatcgaccgaacttttgtagggatgactcgcagcacggcggccttcgtccctctctgatggaacacgttgacgcggaacctcgccttgcccggatagtcgtacgcgaagtcggactcccacgtctccctgtattccttcgcgtgctcctcgtcgagcatgctgtttatcagctcgtccatcgtctggggcgtgagtttcgccagattcgtctgaagcgcgattttcccgtctatcctcaacatcggatggttgccgactttcatgtgaaggtcggacgcgtcgaactggagcattacgtccagaagctctcttatatgcatctgctgttatcctctgcccactagtttggagaattcagggacgttctggcatttcgccaccgcgtcttcgaacttgacgagccgtcgtttcatcagttcggccaagtgctggtccagcgtgtgcatcccctgctccttgccggcctgaatcgcctgatgaatcatgaagaccttgttctctcgaataagactcgatatggccgagttgatgaccattatttcatgcgcgacgacgcggcctttccccgtcgccgcgggcacaagcgtctgagacaccacgctttgcagagtcaccgaaagctgcattcttatctgctgctgctggtgcggcgggaacacgtcgatgaccctgtttatggtctgaaccgcgcctgtcgtgtgcagtgtggcgaacacgaggtgcccggtttccgccgctgttatagccatcgagatcgtctccagagtgcgaagctcgccgacgagtatcacgtccgggtcttcgcgcagcgccgagcgcagcgcgcggtcgaacgacttggtgtcctgcccgacctccctctggcagacgctgcagttcttgtccctgtgcagaaattcaatggggtcctcgatagtcaggatgtgctctcgccgagtctgatttatgtggtctatcatcgccgcaagagttgtggacttgccgctgcccgtcgggccggttacaagtatcagccccttcgggcggtctgaaagctcttccagagtgtccggcagcgccagttctttgatggtcagtatttttagagggattgttctcagcaccgccccggtaagcccgctctgcttgaacacgtttacgcggaatctcgacactcccggcagactgtatgacatgtcgcactcgttcgtctccacgaactcgcgcaactgcctctcgttcatgatggatttcgccatcacgtccacaatctgcgggggaaggacggagcgcgggtcggcagggcggagccttccgtccagacggaagaacaccgggctgttccctttgaaatggacgtccgacccgttgtgctcggccagatacctcaggtacgcgttcagcctttctttcggcgctatgttctcttcgagcgaaggcagtaccggctgcggtttctgctgttgcggttgcggtctttgcatcgacatttttctatggcctcaaattctgcgcttccgccgggcgcgtctcgcgccgccttcggcggttatttcaaaaatcgtccggccgacagtcttacgctgtcagcgccttcaacacgctgccggccgccgtctcagagcctctcagcggccgcagatatctgtccttgtccagcttctccagcgtgtccctgctccagaacgagcaagtatccggcgtgagcgccccgcacacgcggaaaaagtcgttcgagtccttcccgaattcgagatagtaatccgccagagcgatcccgcgcttgtaaagaaacggctgcagagccttgttgacttgagccgccctcgttctcatcgtcttcacgtcgccgtccgtcacttccgtgtagacgcgcgcgcgcatccccggctgaaactccttgaccgcgtccatcttcacgttgaattcgattatggtcacagggagtatcgagcctgcggcgagacgcgtgcgggcggcgaactcatctgaaaccatgttgcgcaccgccacgcgggccgggattatccgcgccgcgacggtctccatctcggactcgcccgtctcgcgcgcgaaatgtgtcgccactccgcaatcttcaagcctcttgaagagcgcggcggcgatcttcatgttcaacgcgcctttgcccggaaacatgggcgacctttccgcccagcattccaccgcgtcgttcgtgaactcgaccgcgaaccggtcgggggacgcgtcagactgatatacccgcatccccggcgtctctcttatcaaagcgcctttccccatgtctttaccccgcgcgggctattccttcgccttccgcgcccgcgctttcttcttcgggaaaaatctctcgtatatttcgtccacgtgccttatgaaatactccacttcaaaacactcctccaactcggcgggtttcaacagcgccgccacttcggcgtcagccgacaacagcgacttaaactccgccttctccgcccacaccctcatcgcgttgcgctgcacgatgtggtacgcctgctccctcgtcgctcccttgcccaccagcgccagcatcacccgctgcgagaatatcaatcccctcgtcttgttgaggttttcaagcatcgcgtccggatacaccaacagcttgtccagaaggcgtttcagcctgaccagcatatagtgaagcagtatgcaactatccggaattatcaccctttccacagacgaatgggtgatgtcgcgctcgtgccagagagccatgttttccatggcggcgtgggcgttggcgcgcaacacgcgggcaagcccggccagacgctcggctgtgatcgggttcctcttgtgaggcatcgccgacgagcctttctggcccttcgcgaagaactcctccgcctctcgaatgtccgttcgctgaagcccgcgaacttcggtggcaatcttctcgatagtgccgccgaccaccgccagagtcgacatgaactcggcgtgcctgtccctctgaatcacctgcgtggcgataggcgcggccttaagcccaagccttcggcaggtgtcttcttcgacatcggggggcaggttcgagtaagtgcccaccgcgcctgaaatcttgccgacagatatcgtctcgcgcgccctttcgagcctttcaaggttgcgccccatctcggccagccacagcagcatcttcattccgaaagtcatcggctcggcgtgtatgccgtgcgtgcggcccaccatgacggtgaatttgtgctctatcgcgcggcgctctaaaatgacgcggatttccttgacctccgagatgagagcgtccgcagactcgcgcatgcggagcgcctgcgccgtgtccagcacgtccgacgacgtcatccccacgtgtataaatctcgagtccggcccgacattctccgccacgttcgtcagaaacgctatcacgtcgtgatcggtctctttctctatctcgtctatgcgctgaattgtgaacgccgccttctttttgatcgtcgacagcgctcgcgcgggaatttttcccttcgcgtgccacgcctcgcacgcggctatctccacgtccagccacttcctgaacttgttctcttccgaccagatcgagcgcatcggctcgtatgtgtacctgtctatcatctcgtcgaaccgccctccgaaaagtagttcctgtagcccaaagtcctcaggcgttcggatttcttaattacagcctcagcctgctgcgccctgaacctgctgtagcgcgaggcaagctccggcttgcccagagccagtatctgaacagccagcagagccgcgttcttgcatccgcccacggccaccgtcgccaccggcatcccggcgggcatctgagctatcgacaacagcgagtccagccccagcatcttcgactccatcggcaccccgatcaccggcaggttcgtgagcgccgcgaccactcccggcaggtgcgccgccgcccccgccgccgctatcatcacttttccgccattgttgtcaaacgtcgtcactattcttttgacatagtcgtgcgtgcggtgcgccgacgcgatatgcgcctcgtacgacacgccgaaactgtccagcgtttcaaaacacgccgtcatgcttttaaggtcggaatcgctccccataacaaccgccacatccggggcctgcgccctcttctgcctagcggcggcctttttcttcttttccatttatcatttttctcccttgagagtatttattctggattttctgatgtttcttttcggagaaaccttcggcagctcgtcctccacctccactcttatcgacgccacgccgtccaaagcccagcccgtcagcttgcccgctcttccgcccctgttccggtcttcgtcttcatactcttcgtcgtcttcgtcgtccggcccggagaaccctaatgactcgatgttcgccacaagctcgttgttcatcggacgactcgaaaactccttcaacacttcatccagacttttctccttctttctttcgcgaaggaaatgagggtctttttcgtcttgtctttcctgcccctcgacttggatttttatcagcaacatttccggagccgccgacggaagctctctggctccggagaaaacgcttatcaccgcgcgtccgggcgctatgtcggctggcactttcaaccatattttttcctcgaccgtctcgctcctaaacggccgcacccccactttcagccccagcttctgtccgcgcttcaccacgggcggacttgccttttctttgtttgccttttctccagccgcgttcggctctttttcttcggctttagcttccggctcggcggcgggctctttttcgcccgtcttcgtttcttccgcttccggcttctcttcgtccccgccgtctatctccactttttctataagcgcgtaagagttcctcgaatctatctcgacgttcaggttcaacttgcgcgcttccgcgtccgcgtatttgttgtccttaagcaattgaagcgccgtcacgaactccaccagagacaacgccgcgatgtcgtccccgtcgtaaaacatgttttccctttcgaccggtttttcgcaggccgagcatcctatggaaaacgacactctggaggttcctttgccgagcctgtcgatggtgttgtcgagactttgcagcgcggccatcgccgccagattgctcaacaaatcctcgtcccgcgccaccttgaacgaatacttctccgtcttgccgatatctccgtcagtgacggttatgtcgaatggtatcagcagaggaaaactgtccagccgtcccacaagagcggggccgcggtcctgagttatctctcctcgcagcgccccggtcgcggcggctttgaacgacatgtcagtgcctcgcgccaccgcgagcaccggcgcgtccgccagcagataccttacatcgcccttcctgaacagcggatgcccgaacatcagggcttgcttgccgtccacgtgcgtcaccgttcccgccgctgacacttccatatctcccgtcagaagcagcacggccaccgaactgccgggttttatctccgagccgggtccgattacggtgcgtcccgttttcgccccagcccatgcgccgcccgcgtccgtcacttctattcccgttccctcgaatattctctttgcaaaaggcatcgttcgcgccgtcaccccgcgaaccatcgccggagccgccgccgcgctcgcaaataatgtcccctctatctcgtccctgccggattcataacttattctcgtaaaaacctttccgccatgctcgaaaggcgcgtcgaactcgaccgtcccggccctcggcgcgtcatactccgccgccttcagcatggacgcgatatccgtaactcctcccagatggtggtccgtcatcggaaacgtcattgaaagcgcgccgacaagcctgtcgccgatatatatcggggaaccgctcatccccattgacactccgccgtatttctcgcgctccggcccggtcaactctatcagtatcagcggccccccgctgaccccggcccccggcataactcctttaactttcaccgggaatttcgatatctccagcccctcgaacaccgtcagcccgtatccttccattccgggcttgacctctgacgcggacatatacgaaacagccggagccgccccggcgacgcgcgtcatcgccccggaaacgaccgtcacaaaaaccgccagcgctccgagaattatccttgcttttgatttcatcattatgttccgccgcgaccgcgcgcctattaaaaatccgcgtggcgacgcggcaacaatctcaacatcaatacctcgcgcgcagttcccgtcgcgcggttaagtctgatattatatctcattatcaaatcaaattaaaacccccgtccgcctctccccgcgccctcttttttcgctccgatggcgctatccgccggaaatatgtaaaattccatataagttgtcaggcttttagccggctccgggagatttgttcatgattatcaataatttcaaagtcgaaggtttcaggtccttgaaaaaactcaacctagaccttatgcctataaacatcctcatcggccccaactccagcggcaaaagcaacataatcagcgcccttgaacttctttccgacgccgtctccggcaaactccgcgacgccattatgaaaaaacacggcggcatgatccccattctttggaatggaaccgcaaaggaaatcggttttgaggcaacaatacgctctcatcgttttggtttcaacgaaaacccggaagaaaacgcatccgatttagtgaaaagacgatatgtttatagtttaaaacttgaacaattgagagcctcaagcgaatatggcattgaattagaaaaactccatgtcgagaatattgccaatgatgatgatttatccaattacacaggcacgattattaacagagatggaaaagaatatttcacgaaagaaattaatagcgatattccagcggctgtgttcgatatttttaaagatagcgaatccatgttttttaatatggattcaatcaaaagtggatggaaaaattatactgaattacaaatatataggttcatcaatttttttaatgactgttcattttaccgaaatctgaatcatggcccggaagcagcggctagacattcgactgtcgcgaggtcggaaaaggtgttggaatcgaacggcgataacctcattgccgtccttcacactctttacaccggcaataaagagttcaaagaacagtttaacaacactctcgaagcggctttcggcgacgactttgaagaactgacattcccgcctctcgaaaacggcagaatctatatgaaatggcgctcgaaaacgcttaaacgcgagctttcacccgccgacctgtctgacggaacgattcttttcctgatgctttccgcgattcttctctccccggaacccccgccgataatctgtatcgacgaacctgaacttggaatgcacccttctatgctcggcatcatcgcggagcttatcaaagacgcgtcaaacagaactcaacttattgtttccactcattctcccgaacttttaagcgccttctccgacatgccggaatcagtcgtggtcgtggaaaaaaaagacggcgcgaccactgcgaaaagactcgaccgcgattccctttccaaatggctggaggaatacaccctcggcagattatggctcgatagagaaatcggcggatgatccatgaaaatacttcttttcgtcgaaggcgataccgaaaacaaaacacttcctgattttcttaaaaaatggctggattccaagctggacaacaggatcagcgtcgaacctattgttttttcgggttgcggcgattatttaaaacgcgccggcaaaaaatctcaattacatcttgataatagcgaagtaatcgccatcttcggcttgctcgacctttatggattgcccgaaaagtgcaaaggcggaaacactgtcgatgaaaaaatcgattttgcgagaaaaagaatcatagaatctttgccggaagaatgcagacctagattccgccagcatttcgccgttcatgagctggaagcatggttgctcagcgatcccgatatattccctcgcgggatcaaactgccagttgaatgcggaaatccggagacagtcgacttcgataaccccccggcaaaacttctcaaggaactttttaggaaatataaaaaaaattacagctataaaaagaccgttgacggcgtcaatctgtttaaaaaactctcgcctaaaaccgtgcggaaaaaatgtcctaatttcaagaagtttaccgatgaaatactggcagccgccgaaaacgctcagaagcggagccttcctcgttgaaatcggaggccggcatggatgaaatcatgactcagtcgacaaaaaagaaaatcttcatcgtcgcgggggcgagaccgaacttcgtgaaagtggctccgattatgcgcgcaatggcagaaagcccctccctgcgccccatcctcgtccacaccggccagcactacgaccacaatatgtctcagagttttttcgacgagttgaacatcccccggcccgacgttttcctagaggtcggctccggcagccacgcggcccagaccgccgccgtcatggtagccttcgaaaaagccgtgctcgaattaaaacccgacctcgttctagtggtcggcgacgtcaactcgaccctcgcctgctcgctcgtgtccgcaaaactcatgataccggtcgcccatgtggaagccggtctccgcagcttcgaccgctcaatgcccgaagaaatcaaccgcgtcctcaccgactcgatttcatcttacctcttcgtcaccgaaccgagcggacgcgacaacctcctgcgggaaggcgtcgcggaagacaacattttcttcgtcggcaacgttatgatagacactctggcggaaaacgcgcggcgagtgaagaacggcgaggcggtccgccctctcggcgatttctccggcgattacgccgccctcacccttcacagaccctccaacgtggacgacccggcgacattctcccgcatcatatccgcccttgaggccaccgcctccatagctccggtcttttttccggcgcatccacgaactgtcaacaacatccgcagattcgggctggacgaccatttcgcagcgtgggacggcgcttcaattcccgccggaaaaatcttcatcatggaacctctcggatatctggaattcctctcccttaccatgaacgccaagatcgtcctcaccgattccggcggcattcaggaggaaaccacttggctgggcgtcccgtgcgccacaatccgcgaaaacaccgagcggcccgtcaccgttgacgtcggaacgaacatcctcgtcggctccgacgccgaaaaaatctcccgcgccgccgccgccgccctgcgcggcgactggaaacagggccgagtccccgaactctgggacggccatgccgcctcccgcatcgtctcaaaactggaatctctgttatgttaagtttgtatcaacatcgccatacatctggttttcatcgatctaagaaaaaagccgattttgcaaagaacgaagttcagcaaaatcggcgaccaagagtttttttcggaaggggcgcggggaaacctgttttttgcaaaaaaatggtttcaccgcaaattactaaaaatctattatccatatattattttttccctcgctgacattgcttttcaataatgatacaatacggttgcggaggaatccgcgcgctatattggcgtacccggaatgttttcgggcatgtttaactgcggcaggttgtcttatagtgtctgatttgctgaaaagaaaaattgttattgcggcggcaacggcattggccgttctcgcgactctgtccgccgctgtgcccgcgcgcgctctcaacctccactacacaatcaccgcaaactacataatgttcgacatagaccgaaaagtgatttactgcgacggacaggtcgagcttcttcacggcaaccttcgctttcaagccgactcgatacgggtggacgtgaaatcgcacatcttctacgcagaaggcggcatcgtcgcttccactatgaagaaatccgcttccgcgctgccgggcgacacggcttcgccgtccaccaaccctatattgacggacattgaagaaaccggcgacctgctcgaccagcgcgtcgaagctcagatcacaggcatggacggcgcttcattttcaggcgaccaacttaagttcgacttggatcgcgcggcgggcatcctcactcaaacccaaagcggcgtcaggactttttatctggtcggcgaagaactcaacgagacggcccaagagcctctgatgggacaggcgttctacatctacgaagagccttatctcaccgcaaacgccgtgaccgccgcccgcatgcgcatctatcccggcgaccagtacgaagcgtggcgcgccaccatgtgggtaaaaggcaacaaagtaatgtccctccctttctggaccaacaccagcaaaaaatacaccaccggcaaatggcgcatccggaacgtcagctacggctcaaacgcggactggaaagtcggcgccaacgtgcgctacaaggaagcccgcgacttcaaaggcttcgtcgatttgaactaccacggggacagctcgaacacatattccgcggacctgcgacagtcgttccgcatgaacacccagacaagcggccagttcaacatgcgcaacctgttcggcggagacaggggctacaccatgtccatgtcgcgctacgccgccggcatgagatcgcaaacccttcagatggactacgacctttccggggcgaaaggattccggctcggagccgcgggcggcattaagaaaaccagaataaacggctacctctcaggccgcagaactggagacggcgactacggccaatcatccatgaacgccctcgtcagcttcgacggcaacagaaagttcgtcaatggcaacacgcggggcgtcggctattccgtaagctctcacataaaaatggacaacttcgattataccgacgccgtgacggcggcctacaccaccctcaccgccgtcagcccttcaatcgccctgtcaaaaaagaccagcattgattggaacacagccaccgggcttggcggcgacaccgaaggcaggcccagcgcccgcctgtccgcctccgcccgcatcggccacagaccccggcagggaatgttgattcaggcccgctataatttcactgacagcagatacaccggctcctccaccgtcaaacgccagcttatgttgtacgtgtcgaagtccaaagggcttaagtggaattccgccctgtcggcgacttatgacatccgcgaagcaaccatcagcagcctgtcttccggcctcgattacaccgtcaacaaaaaatgcagactccgcacggacttcatttacaatctgaaaaacaaccatttctccaccaagaacttcaacgtcgactacgacctctacggcacgcgcatcaacacccgctggttcgccgacaccaacgatttcatgatcgacttcacatcaaattactaagccggatttgcgcaatactgttcaataatcacaaaaataggagcaatagccgaagcgccatttgattttacccattgcgccgagcgccgctcccaaccatattgtgaacgcatagcgaaaaacggggacttgcagcgctgcatttcgcgacgggtgtccgtttttctcaaagtcaccgcccattgtttcctgttaatatcatgtagacaatggctaaacataataaaataaagcttatagacgcaacaacctttatggcaatgtttacatcttgttcatcaagatatgtttgcttaaacgcaatgttttttcttcttgtcttgatcgccaacgctaaatagtatttaataaagacaaaaagatttataattaaaacaatcaaagcaattggatttatgcaaagcttaaatgatagatcttcatcagacacatctcttgtgagcatcataacgaaccatgccacaataacatttacaaatgctaaatttttaaacgcgcgatgtcttttctttattacattgtatgccacttcgataataaccgctgttaataataacaataagaacaacattgctaatatgcgccttcacaattataatctgctcgattttctcttttgattctaaaatacgtttctacttcgtcgatgacttctgtaataacacgaccagtcgccattattagccaccagttcttttcgttctgcccataatggatgcgcgatggattggcaaaaacccaaaatggtcattcacccatttctgagcgagtcttggtcatgctttacggtcgattcggttggttttccgggctgctttcgccttccttcttttcctgatctttgatctttccaagaaattcgggaaggctgactccagccatctcgcagacatcgtgcatcgcaggcagcattttcgtgaaactgcctaaccagttggacgctgtcgagccgccgccattgccgccgccgccgcagtcccacactacgatcttgtcgaatttaatgttgcttatcgcttctgcctgcgcttttacgatttccggcaactgctccactatgagcaacatggcggctttttccgcgtcgccgttcgcggcttttaccatctccgcgaagccctcggccttcttctttaggatttcttggatgcctgccgcttctccgctcagccgctctcttatttccgcgccttcaccctgtcctttaagtgtttgttgttcctttatcgcttccgattctatgattaatttttctttttctatctcagccggcacaaccacatcggctttgcgggtggatttttctctatcagccctagcttcctccgcttttttctcggctatgtaggctagggtggcggcctcggcggctttggttttttccgcggcgacggcctttctctctgcttcggcttccgcttctcgtctgtcagcgttcgagttggcctcgactactttagcagtgttctcgcctttaatggcttcggcattggcagtggcaacgttaacgcgcatctgctgttgcgcgttcgcttcgccggttttgccgtccctttcagcatttgcaatattaacgcgcatctgctgttgcgcgttcgcttcgccggttttgccgtccctttcggcatttgcaatattaacgcgcatctgctgttgcgcgttcgcctctccggtcaggccgtctttttcggcgtttgcaatattaacgcgcatctgctgttgcgcgttcgcttcgccggttttgccgtctctttcctgctgggccacttccaccttggctttgtttatagcctcggcagccgcttttttccctaacgcctctatgtatcccgattcgtcggagatgtcggtgatgtttacattgattagcttgagaccgagcttctcaagttcagattcaacattcttcattacttcttcttcgaacttttcacgtttcgcattgatctcttcaatactcatcgttgctatggtagcgcgaagttgcccgaaaataatgtctttggcattttcctcaatttgctccttgctcatgctgagaaggcgttctgcggctaccgtcataaccgatgggttggtggaaatgcctattgtgaatcgggatgggacatccaccctgatattctgattcgacaacgcgtttttcagaccgatgtcgattgtcatcggcgtgaggtcaagatattcgcaagcctgaaaaagcggccagacgaacgctgcgccaccgtgtatgcacttcgacgtttgacccttcgccactttgccataaacgaccatgatctggtccgacggacaccgccggtacctagtcatcgcggcgagcaaagtcgcgaaaagcacaattgctactacaacaagaccgataagcatgtacatttaataatcctccgcaagaaacattatttgattttttcaatcaccaaggtttgatccccgaccgtctctattacttttatctgttctcctttatttagcctatctccctttgttgccgcatcaagctctaccagtcttccctgaagaacaatattgacctttcctctgccattcatgttttcgggcactgctatcgttacagagccttcttttccgacggcgtttttcagcgacagagttccgctgcttttcatggaagaaagccctttcataagcagcatcaccaacgctacggttacaactccgcaaacaccggcgatgattaccgtgatcgacttcgacaagcctttctccaagcaggccaaaccaaaccaagagaaaccgaggaaaaacgccaccatgtttctgatggtaaaaaaaccaagaaataaatcgctatgcgtgtcgctgcccggatctacatctccggagtcgatatcgtcgccccctgcgaaagtgaatatgagctggagcaagaaaaacaccgagaatacaacagcaacagcccaaaataccttttcaaaagagcttaatgcaccccaccatgcttccatttttcaccttcacaaataaggatttcacctaacattattcgcaaacatctaaaatgtcaataaatgagcctgtcattttgccttgatgtggtgtctgtagtgataaagctattcctgcatttcaatatttccatcagtcaccccgagatgaatcagagcaaaaccgggaaccaccacaatgctaaacaactaaaattgctagaatatcccggtacagccgcctatttacgcctcctttatttttgctgttctcgcatggtgttactataccatatcgggcggtcttgttgtcaatcgtcttgagcttccccccaaaaactggacagaggtttaaggtggaaaccgtggtggtgtagaatccagttttggagggatgagcgatgaggaagaaattcaccccagcgttcaaggccaaggtggcgcttgaggcgctgaaggggcagaaaacggttgccgagctggcgaagatttacgaggtgcatccgaaccagatcgggcagtggaagaagaaggtgctggaagaattgccgggtgtattcaacggcaagcgggccagagaggacaaaggccgggaggagcatgtgggggagctttaccggcagatcgggcagcagaaggtcgaattggactggcttaaaaaaaaatctggacttgccgactgagcagaaacggcggctgatcgacccttcgagagaggcgctgccggtgtggcggcaatgcaaactgatgggactggcgcggtcgagttactactacgagccatgcggggaaagcgagtacaacaggagcctgatgaagctgattgacgagctgtacacggagcatccgagtctggggtcgccgaaggtcacgaagctgctgcgaaacatggggcacgaggtgaatcacaagcgcatagagcggctgatgagggtgatggggcttgcggcggtgtatccgaagccgcgcaccagcattcccgacgccgcggcccgcaagtatccgtacctgctggcggggctggcaatagagcgtcccgaccaggtgtgggccacggacatcacgtacatccgcatgcgcacagggttgcgtatctggcggcgatcatggactggtacagccggtacgtgctctcgtggcggctgagcattttcatagacgcggcgttttgcgtggaagcgctggaagaggcgctttcgcgcggatggccggagatattcaacagcgaccagggcgcgcagttcaccagcgaagcgttcacaaagccactgctggacaggagcgtcgccatcagcatggatgggcgcgggcggtacatggacaacatcttcgtggagcggctgtggcggtcggtgaaatacgaggaggtttacctgaaggattacgccgacgtatgggaagcggagcgtgagatttcgagatatttgcgctggtacaacgaagtgcgccctcaccaggcgctgggctacgcgacgcccgcccaggtgtactttgaccggagcgtcgaaattggcccgcagggcttgcgaaacagcgcggcgagtgatattgtggcggcgtaaaagaaaacgcgccacagaggaatggaggggcgttttacagagagaaaaaccgcccggcgacaggaggtggcaaagcaaaacaatcgaatgcggggacttgggaaaactcctcgcgtgtgagcacacgtacacgcgcgcgcgcacgcatgatgcgtgcgtcaggaacaggcaaagtcaaaggcaaaagactaaaacctacaccaaaccccaccttataaacccccattttctgtccaaccaatggggggaggttcctctgtcgctctttgggttgataataatagacgtctgttctttgatagaaacatccgatggttatattttttattgcgcatcagttatcataaaacaaaattgagaagtttgggaaaagggggttggggaaagaacccttttcaaagggtttttccccaatcgccaaaagcgacagtctcttgtgtcggtttatcaggattatacagtttttcggatttatacagtttttcaggtttagaccgggtcaaccgcgtcgccgagcagcgcgcgggaaaattcggaggcgttgaacggcagcaggtcttccatcttttccccgacgccgacgaacataatcggcatgcgccattccttgagtatggagaatacgaccccgccgcgcgccgttccgtccatcttcgtcagcacgagggcgtctatcgggacggcctgtccgaactgctgaacctgattgtatgagtttcttccgatggtggaatcgaggacgagccacgctctgaagttctcgaccccggctttttccaccgccacgcggtggattttctggagttcgcgcatcaggttggattgagtgtgaaggcgtccggcggtgtcggctataagcaggtcggcgccgcgcgcgcgcgcggcctgtatcgcgtcgtacatgaccgccgagggatccgcgccctctctctgccttattatcggcacgtccgaccgcttggcccatatctcaagctgctcggaagccgccgcccggaacgtgtcgcaggccgccagcatcaccttgcgcccttcggctttatagcgcatcgccagcttgcctatcgtcgtcgttttcccggagccgttcacgcccatcatcatgacgacgttcagcccgggggccaaaggctccgccgcagcgcccgattcgagtatctcggagagtatgtccacgatgagcgcgtttagcgcttccgcgtccggcgggcgtttttcgaccgctttgcttttgatttcatctacgatcagcgcggcggtggacgcgccaacgtccgacaacagcagcgcttcctccagcctctcgcagaactcgtcgtctatcttcacggcccgccctatggcggctgatattttatgccgtaagctgtcgctggtcttcttgagacccttcttcaatctgtcgaacatggttgttattccatggataccgtaaggagcttcgagtatccttcctgtttgtccattgttatgccgaacaattgatcggctcccaccagcgttcctttgttgtgggtgacgaccagaaactggctgttggtcgaatgttttttcagcatttcgcggaaccgcacaatattgctttcgtcaagcccggcgtcaacctcgtccagcacgtagaacgggctgggtttcactttgagtatggagaaaatcagaaccagcgcgcaaagggctttttcgccgccggacagaagggttatcgccctcatcctttttccgggaatctgcactgaaacgtccacgccggattcgagagggtcgccgtcgccgacaagcatcagctccgcctcgccgccgccgaacatctcgacgaacgtctcctgaaacttctccctcacccgctcgaacgtctccatgaactgcgctcggctgcggtcgtcatactcgttcactatgtccatcagggtcgcgcgcgcgtcttcaagatcccctatctgctcgctgagcaggtcgaatctgttggacttctcctcgtattcgccgatagccagcatgttcaccggctgaagcgtctcgagctcttttttcagcgcgaggtagcgtccttttccggccgggccgccgtctgcggtttcctcaagcgcccgctcctcggagacatcgtcgaactcctccgagaactgccttctgatctcttcgagttgcgtttcagcgcgcgcgcacttcatctcgctgtccagcatcgcttctttgagttcttccagtcgggtttcaacagcgtgtatctcgccgcgcagccgcaggctttcgtcttccatgcctttgagagcggtccgtttctgcgcgagcgcggattccgcggcggcgcgcgcggccccaagctccttcgccagcgcctcgcccgctttcatctcttcggaagtccggagcctgtccgccgacagcttcgacttctccgcgtcgatatccccgcttctccttcgcacccgctccaactccgcctgcctgtacttctcggcgtcgcccgccgcctctatctcccgcctcagttcccccatctcgacgcgcagatcaacctcgcgcatctcccgtttcctgaacgcgtccgctatctcgtccagccccgactgcgccgtcttcaactcggcttcgaggctctttctcttttctgaaacttccttgaacttcgattcgagcttggcgacatccgactctgagccgcctccggttgacgcgcattcggccagcgctttttccgccgattctaggtctttcgtcagaatttcgacgcgctccacagccgccgccgcgcgctcgcgcgccgcggccagttcgatattcagtttgttaaattcttttccagacgcttcggacgacgacctcagcgacgcgtatttcttttcagcctcttcgcgcgcggcgcgggccgccttgacttccgcgttcttcttttcgagttcggactttagctcggccacgcgctctcttgcggcctcgctggtcggcagagcttcgcccgtgaacagcgtcccgttgataaaacacgccgctccgtccgccctcacaaccccggctcccgaaggcagttccgaaatcgcctctttcatctccgcgtcggtgtcgacaatcgcgaacattgataatacattcagcaactcgttcggcgctgcggatttgaccgaaaccgcgtccgacaggagccgtttcgcccattttttctttttgagagccgccgcagccgccgccccggctcctgagaaccagtcaagaatcagcctcgcggccccgccgtcggcggcctcttcgagcgccttccctatgtccgcggacgtcgaaatagaagcgttgaaaagctcgttcaaagcgcggcgcgcggcaggctcgaacccggttttgatctcaatctcgtcggcgagccgggcggtttgtttccctttttcgctcacggccatcaggcccgctacgcgttcgatagcttcgacccgcgccgacaaagcgttgcgctccgcgacgaccgcatcaagcgccgaccgcgctttatcccgcgcggcggaagtttcctcgatgcccgcgcgaagcttttccgcctgcgattctttttcgcggatttgtttttcaaattgcgaaactttttcgctctcggacttgccgcgttcccgcgccgccgacagcctgtcccgcgcggaatcgcgggcggaggtcagagacttcactcgcgcggccatccccgcaagcctgtctttcgccaccgccagctcgcccgcaaggctcgcctccagcttcttcaaatcctcggcttccggcagaagcccgtcgcgcttctctgtcaggtctttcctgttcagcttcagatcgtcggaggattgttttgtggcgttttcaagttcggcggcggcttcatcgagcctgcgttttttctgctcggccttcgcgcgaaggtctaatatgtctttttcgagatttttctcctgctttacgatatcggctttttcgatgtcagcggcggcggcccttctgtccgcgtcttccaccgcgcgggccagcagcctcgcggattcctccgcgcgccccagtttcgagccgatgtccgccaactcgcgcagagccgagtcgatttccgcccgcgccgcgtctatgcccgcacccacattctctctggactgtctcagctcgccgactttcttcagcccttccgccctctttgccttaaggccctctccctcgacggaaagctgttccaagcggctcttcaaacgccttatctcggacgcgaaaacgcccagcttcagcctttccatctcctcgactatctcgtcgtaccgcttcgccttttccgcctgctctttcaaaggccccagcgattcggagatctcggtcagaatgtctttcagccgggagatgttgatgttcgtgtctttgattttcgacagcgttttggttttttcgattttgtatttatttatcccggcagcctcgtcgaatatctcccgccgctgcgagggggacaagtcgatgacgtactcgacgtcgccctgattgattatcgaatagttcgtggtggacagtccggtgtcgatcagcaactcctgaatgtccttgagcctgcaagactcgttgttgatggcgaactcgctctcgccggatttaaagtaccttcgggttatcgagatttcgctttggggtagcggaaaatagccgtcgtcgttgtcgaaagtgaggacgacttcggcgaagccgaggggcttgcggctggcgctgccgtgatagacgacttcttcgagcttgcggccccggatcgagcgcatgctctgttcgccgagcgcccaagttatcgcgtccaccagattgctttttccgctgccgttcgggccgaccaccgcagtgacgccctcgcggaactcaaagaccgttcggcgggcgaacgtcttgaatccgaacattgacaccgatttcagatacattgcgggccttgttgttttttatcgtctcaggagccgtcggcgctcatgccgagtatcgccgcgcgcgccgcctccgtctccgcttcctttttgcttcgcccctcgccggttccgtgcgaggccccgttgatgaagacctccactttgaacatcttgcggtggtccgggccgttctcggatatcataacatatcgagggagagtcttgtggcgtttctgagcgtattcctgaagttccgtcttgaagtcgcgcgcggcctcgccgcccgcctcctcaaggaactcagacatccgctcgatgacgaaatcgcgcgccctctcgaatccttggtcgatgaagacggcccctatcagcgcctcgaaacaatcgaccacgaacgccgtgtggtctctgccggcagactcctcgacgcccttgccgacccggatgaaatctccaagctcgattcttcgcgcggctttcagcaaaacgcctttgctgacaatgtgcgccttggccttgctcatcgcgccctgatcgtcttccggaaaagatttgaacaggcgttcgcagatggaaagagctagaacggagtcgccaaggaattcgagccgctcgtagctgcgttcaagccgctcgcgttccggcagcacacacgaaccccagtacgacggatgcgtaagcgccgccctcaaacccgactggtcgttgaaatccacgccgatgattcccagcaagtcctcgagcggcctcgggaatccttctctgtcccgaacttcgaggggggaaaggttcaacgggtcacacctgccgttttttcagataatcggcggcgtctcccaccgtgactatcattaccgcgtcctcgtccggcacttctatgccgaactcgtcctcgacggccattatcaagtcgaatatcttgcgcgagtcggctccgaggtcgtccctgaacgacgcctccatcactatcctgtcctccgacacgccaagctccgccatgatcactttcttcaggcgatctatcatgtctgacatttatcgtcctgcctccgttatccctcgactttggtcacaagaacagtcttgcccttgtagtagccgcatttcgcgcatgcgcgatgcgtcatcttcacttcgtggcactgcggacattccgtcagcgtcggcgtcttcaagcctcttttccactgcgccttctggcttcgtgtgctcgaacgcgatttcttatatttcggaagcgccatcttctttcacctcccgctccatttttctctctaaaaactttcttccttctttcaccgtgctcataactttgtgcaatgtttgctccagattgtcaagcgtctggagggcatacatttccgcgccggccccgacgtcccctttgccggccccctcaggcgaagacattttctccgccgtcgcccttgccgagtcctcttccgcctcggcctccatctctatcctcatcgacctcatttcattgagcgtcgcgtatatcttcttttcgtccacaacgatttttcctataaatgaaaggaaaaaaccgctgtccagatgcgattccagcgtgtccagcaacttctgaaaccttgccagtttttctttcttcaatcccggcccgccttccctagtcgccttatcccgctctcacttctttgaatatctttccttcagcttcgcgtccaccatcggcgacacaagagaactcacgtccccgccgaaagacgccacttcctttattatcgaggagcttatgaaagaatgctccgtgctcgtcaccagaaacaccgtctcaacgttcggagccagtcttttgttcaccagcgccatctggaactccatctcgaagtccgtgaccgcgcgcagcccgcgcacaaccgctttcgctccgcacgccttcacataatccacaagcaacgtgtcgaaactctccaccttcacattggcgatgtccttcgtcagttccttcgctatttccatcctctcctgaatcgagaaaagatgttttttggacgggttgttggaaatcgcgacgataagctcgtcgaacaccgaggccgatcgctgcactatatccatgtgaccgttggtcatcgggtcgaaacttcccggatacgccgccatgttcatttttcgatgtccttaatgtttttccagaccgtcacccagcttgagccgtaccttctggagtcccgcattgaaagacttccgaactccccgcaaaccggtttcgctccgtgctgtccgacaatcctgccgccgtccgccagcatgtccgccagccccggcgattccatcgtcgcctcgaacatccccccgtcatacggcgggtcgaggaaaatcagatcgaaaattcccctcgccgcccctccggcgacgtattcccttgcgtccatccttataatttcaaccttgccctcaagcccgaatttactgacgttgcgctctaccagtcgtatcgctttcgacgagtgatccacaaacaccactctctccgctccccggcttaacgcctctattcccacactccccgctccggcgaacaggtccagaaaccttgctccgtccatcggcccggtcaggttgaatatgctctccctgactcggtcgtatgtgactcttatgctgtcgtctccatcctccgggccgaacagcttggatctcttcaaatcgccgccgattaccctcaaaactctctccggtcggttgcgcgcctaacccggatttttcgcaagaaaaacccggacttgacaagcgcgtctgcccgtcggacatccgcgcgaatccgtataatataacatatttatatattttatctagtatataaaagaactattatttttctgactctgccagtcaaagcacggttcctgcgcgcgcgcttgtaatctcatccttcataacggcaatttcgccgtttacaatcaccgcgtcgaacccgcacggatatctgacggggtcctcatacgtggaattatcccgaagcgcgtcagggtcgaacaccactatgtccgcaagataaccttcctttatcaatcccctgcgggcagccccgattttccttgcgggcatagacgtcatttttcttacggcctctcccatcggcatcagcttctctccaatgacataatgcttcaggaacctgaccgtcgtggagaacagccggggatgcgccttcgccccctcgtccgtctccaccccgtccgatcctatgctgctaagaggatgcgacatgatgaaccgcaggtcgtcttcggatatgaattcgcccgcgaccggggcgttgctgaaaccttcttttagaagcacatggagcgcggcggctttagcgcccttgcccgtgtccttcataacatccgccagcgtgcgcccctcgtactgcttcaattttttcagttcgaggaaaatcaccttttcctccatccccggctcgttcagcagcatcgtcgtggcgagtatgttggaaaacgccgtgaacggatagacatccgcctcgacgtccacgccgcgcgcgcgcgcctcctccatcatcttcatcgttttgcgcggcttgccccagtttcggctcaggattgccttgtgatgcgatatctgcagagacactcctgtttccatcgctatcccgattgcctcccggttcgcttcctcaagcttgtctatctcgtttctcacatgaacgctgaacagcgcgccgcgtttcgccgccgtcccgcagagagccttcacttcttctctcgacgaaaacatctgcatcggatacgccagcccggcggaaaaccctctcgcgccttcgtcaagcgacttatccagcaacgacttcattgcttctatctgccccgcgttcgcttttaacggcgaacgccccatcgtcatctgcctcaaattgccgaacccggtctgcagaaacacattcgctccgattccgatccttttgatatgttcgatatacccggcggtggaatcccattcaaactgacactctgttccaaacatgccggagaggtatcccctgaaatccctcctcagcctgtcgttcatcggcgctccggaaaaaccgcacgagcccacaaccgctgtcgtaaccccctgcctcagcttcgcctccattgagccgttcacggctatcttgaaatccgaatgcgcgtgcatatcaatgaagcccggacacaccatcttgcctgtggcgtcgatggatgaaagcgcgggatcatccgcgcgggccatggcgctcgcctcgtcgcccacagcctttatcgtatcgccttctatgtagacgtcgctcctgacgcccggcccgccgaccccgtcaaaaactgttccgcctttgatgtatatctttccttccatgcgctaatcccccgctatttcggacggcgtttccttcacttcgccgctacgccgttatatactatatccgattttatcgacactgcgcgcggagagataaaatgtcacaacaaaccgaaagagagcttgtttcgcggctcaataagaacatatccacaaaaaagaaatcccccggaaacagacgctgcgtcgtcggcttggacggattcatagacgagatagtccacgtggtggacacccgcaagaacaactccgaatacgagcggctcgaactgatgtccaactacgccgaaaggataaaaagctacgcgggcaagagcggcaacatagagtacgtgccgcagcgagtgaagatcggcggcaacggcccgattatggcgaacgccatcgcctctctcggtgtctcgacgacttatatcggaacgctcggcaggccggatatccatcctgtctttcgccccctgaaagacgccgcaaacgtaatatccatcgcagagccttgccatacggacgcggtggagttcctcgacggaaaaatcatggtgggaaagatggcccccgtatcagacgtcacttgggacaggattctggaggatgtcggaaaagagcgttttgtcagattgctgcaagaggcccacttgctcgctctcgtcaactggagcatgctcccgttcatgtccgacatctgggaaaatatcatcgcggaagtctgcccgaaactttccaaagccggcgaccgctttttcttcatcgaccttgccgacccccagaaacgggagttgtccgacattaaaaggatgttgagcatagttccgaagttttcaagttgctataaagtcatacttgggctgaacggacgcgaggctgggcagatagcgtccgcgctcggcgtctccgccgacgcttccgggccggacgccgccgcccgcgcctgcgaggaaatctcccgcgcgctcgacatctactccgtcgtggtgcatcccgtcgaattcgccgtcaccgtcgtcgacggcaaaacctaccatcaggacggcccacacacaaaacgccccgtaatcacaaccggagccggagaccatttcaacgcggctttctccctcgccctcgctctcggaaccgatccccaaacggccctcctcatgggcgtgtgctgctcaggctattacgtgatgacaggcgagactcccgacatggacaagctgttgtcgttcatgtccgactggcgggacgaccccttcggcaaaatgtgaagcgcgcctcttctgatgttgccaataatatacccgacatccgcccgtaggtggcgacccgccgggttgcccggatgtgcgataaaggaaaaaggcgacagcccaatcagcgggcaattcatgaattgcccctacagctaaaaccgcaattggcaacgtttgtcattaggctatacatgttattaaatgattccacccgctaccaagcgcgccatgcgcaaacttttttctttgcgcattatgctttttaccaaaatagttaatgggaaccttcattcaattcttcgtatatacgcgcaaacgcatttgtgacaatcagcatttattgccgccattcgcctcggatgcttttgatataataaaaaaggggcggcccgaaagccgccccttgcgtttcgcttgtgcttcttaaaatgtcagcccagcagcttcgagatcattccggctgctttcttcggattgagaagatcgcggcgggaagccattttgatcttctgctgtttctccctgtccgcgtacatttcgaacatctcttccttgtagtggaagacctgaatgtagttgacttccttgtaatcgctcgaaatatgagcgtccgggtagcgtttcttggcctcttcgacgcgctggagggcgagtttaacaatgtcctcgcgcttgccgaattcgagcgctccggtcgggcaagtggtgacgcacgccggctgcaggccgttcgtgatccggtcgaaacagagcgtgcacttaacgtacggcgctccgtctttttcctgtttcgggatgttgtagccgcaattcatcccttcgaccttagctgtccgctcattgtatatgacggcgcccgtgtcggtgatgacgacggctttgtcatccgtgccgtcggcgatcatcttgcaggccggctctatgcagtggcggcaggagtccttgaagaacgtccagatgattccgaggtctccgccttcctgttccttgaatctgaccacggtgcgggtctggtgagaaaggtcgggcgggttctggtgggttcctcggttgttcgtcttttccgcggcgtcctgattccagttcttgcaggctttctggcaaccgcggcaggcgatgcatttcgaagagtcaaaaagttttgcgtatgccattcccgatcaccccttcctttctatattcaccatgaacgccttggattcagggatcatggtgttagcgtcgcccacggtgggcgtgagcaggttcgcggtgtctccgccgttttcaggcgcgcaccagccgaagtgccatgtggttcctacctgatgaacggtctggcctttgattgtgaaaggtttgaatctcgatgtgaccatcgcgacgacgtcgatctggccgcgcgccgacttgattgtgaccatttcgccgttctttattcccttgagggcagccagctctttgctcatctcgacgaagttctgcggagccagttcgacaagctgcttgttccagcgggtcatgagtccggtctgccagtgctcgacaaccctgtacgtggagcaaacgaacggatagcgcggatcgcaggtcaaataaacgtccttgccctcgccctcgcccttttcgttgaacagcttgacggtcgggttgattctctgtccgctgaaagcgttgttctcgaccgggcattcgagcggttcgtagtgttccgggaacgggccttcggccagtccgggaccgaatatcttgcctactccttcccatgtcatgataaaaggcagtttgcctttttctttgtccgacatcgggggagccgcgttgtccgcgatgtctccgacccatttggctccgtcccacttgatgacgggcagttcggggcggcgcgggtttccgtcgaggtctaccgacgcgcggttgtatatgatgcggcggttcaacggccagcaccacgaccagttggagtaaagcccgatgcccgacgcgtcgttgttgtcccggcgcatcatcatgtttccggcttcgggataacttccgctgtacagccagttgccgcaggcggtcgagccgtcgtccttgaggccgacgaagttcgtaacctgcgtccccttttttaacacagcgccgtccgctccggccacgtcctgcgtgtaatagccgttaacctcgcgggctatcttgcgagagcttaggtgtccgttttcctcgtaatcccacgctagtccgagtatcggggccgggaatgctccgccttccgtcttgtatagctctttcaagcggtgaatgaggccgtcgataatctcggcgtccggcatcgcttctcccggaggattgacggctttgtagcgccactgcgcccaacgtccgctgttgctgatgctgccttctttttccaccgacgccgcgcagggaagcatgaacaccgcggtctttatcttgctcgggtccatccccgggcctttccagaactgtcccgtctcgttcgggaacagattcacgttcaccagccagtcgagttcgccgagagctttgcggacttttccggcgttcgcgctgctgcatgccgggttcatcccccacgcgaagaatccggagaatttgcccttgctcatctggtcgaacaggttaagccacgagtagttggctcccacatcgcccttcggcagccagccgtatccgaaatcgttttccttcgtcgctgattcgccgtagaatgccttaagcaggctgaccatgtacttcggggtgtggctccaccagttaaggctctgaggctccgccgtcgtcggcgtggtggccttcaggaagtccgccagcgtggcttgtgtgccgagtgggaacttcagatagccgggcagtatgtggaatagaagggcgaagtccgtcgagccttgcacgtttgactcgccgcgcagcgcgttcacgccgccgccggccactcccatgttgcccagcaacaactgaattatcgacatagtcctgatgttctgggttcccaccgtatgctgcgtccaacccatcgcgtacaggatggttccggacttcgcgggaccggatgtggaagtgtacgtcttatagacctttaaaagctcgtccttggtcgtgcccgtcacttccgccactttgtcgatgtcgtagcgggaataatgcttcttcagaagctgatatacgcagttcggatcctgcatcgagggatcctttattaccacgccgttggcgtctttctgatacgcccacgtcgccttgtcataattgcgtttttcagcgttgtatccggagaacagcccgtcctcgaacttgaagtccttgttgattaggaacgaagcgttcgtgtaattctggacatagaacttgtcgatcagatcgttgtccagaatatacttaatcatgccgcccaagaacggaatgtccgtcccggagcgaaggcgggcgtaaatatccgcctttgaagacgtcttggtgaaacgcgggtcgacgctgataagtttcccgcctttctccatcgccttcgtaacccatttgaatgaaatcggatggttttccgctgcgttgcttcccatcaccaacacgacatcgctgttgctgaaatcgatccagtgattggtcattgctcctcggccgaacgactctcccagagccgctacagtagccgagtgtcatatgcgggcttggtgttctatatacaccaagcccaaacctctgaggaatttttggtagatgtagcactcctcgttgtccagcgcggcgctccctacggacgcgattccttccgtgcggttcaccgtctctcctttggcgttcttctcggcaaaactcgcgtcgcggctcttctttatccgctttgcgatctcgtcgagcgcccagtcccacgacacttctttccattccttgccgtacggctcgcgatacaacggcttagtcactctgtcgttgttcaccgcgaggtgatacagcgacgcgcctttgctgcatagcgcgcctcggttgatcggagcatccgggtcgccttcggtgttgattatcttgccgtcaacagcgtgcaccaagatgctgcaactgaccgaacagtacgggcagatggtggttgttaccgtcgcgccttttgtgcgcaactctgcggcataggctcgggaactcttgaacccgaaaccgattccgctgagcgacagtccggctaccgtcgcgcccgaaactttcagaaacgttcttctggtcagcttcatgtgtgtgaactcacccctctcataggatttatttttaatcaaacaaatacacctttagcttacacagtttcttctcataaccacttcaaaatacccacgatgaaaagaggtgtcaatagaatgagaaattaatagaaatctatgtcagaaatgacatagattttcaaaataatcttttatctatttggatatttgcttatgctatatttaacatagcttcgacgtatagttcaccgagcgaacatcctaacaacgtctctccgggcgcgtccgccgatagcacgcaaccatcctctatcgtgccggggccggaaagtattctcgcctccggctccaccgccacaagcctgtctcctgccactccgtggacgattatcggctctttcgcgccgaccgggagcgtctccctcaattcgcagaactctatccttgtgatctctccggggtcggaatgaatgtgaacggcgtaatccctcgcgcctttttcgtccacaaagaaatgaacgaagttcaagtcccgctcccctgtcctgtccggcggcgcgcccccccctcctaattgtatatatataattccttctatttcttccctttgcgcgctgtgcttgtgcccgtaacaaacatactccacgcccgccttctggaacatccctatcatcctctcgacttccttttctctttcctccaacgttgtgttccttatgtacatcgggtcaagcatgcttcggtttccgtagaccgggaaatggaaaaaaacgaacctgtgctcggcgggccgcgcaagctgctcctcaagccactcccattgttcgtccggtttcggcccgtccatcctcaacgttgcgtcgttgtgtttctgcgcgttgtcgagcatcagaacctgcgtgtccccgtaattcaccgcgtaataaagattgcccatccgctccctgtacagcttggtcgacaggtagctgtcgtggttgccgattgtcgcaaacagcggagcttcgagtttcgccgtctcagtttcaaaaacgttccattgcgctggttcgtccacatccacgttgtcccccgcgtttaccacgaaaaccggtctgcgcaagttgacctgacggcgcacgcgcgcgaactgctccgtcgccccgtccgcccccagatgcgtgtcgctgaaagcgataaagttcagtcgctcgccgggcgccgggttgtatgcggtttccagaactgcgcctcccggccgcgaagcgttcgccctcagcgctacgattccatccgactcccggatctccgccgtctcgactccttttcccgaaaacgacagcctgcctgcccggacattcgccagttcgattctaaacgcgtccgtccccgccgctcccccctgaatcctgaaccccggctcgagcgatgtggcgcgcactcgggcgaaaccctctccgcgctgacgcacgaacgccccccgcgcggatatcctcagttcctcgctcgcgcgggcgccgccgaacggccatgccgccatccccgccgccacacccgctcccgctgcggccatccccttcaaaaaatcccgcctcgtcatttctttcataaagcgctcccatttttcgtcagaaaagcttccggttccgcgcgcacggcgcgacaaacaatgaacatctctttgactcgtttttcagcgaaattccatcttcagccgtcgctcgcagcttcttctattccggcgaatctgtttctcgttcgacaggctccggggaatccggtttgaaccttgctttgttgattacgaatataaaagtgtcgccctgaatgaaatagggatgaaacaagtccggattgtccgccgcccaatatgcttccaccggcgtttccactctcccgcgcgcaaactcgcgcgttaggaatagaacgtccacatcttcctttattaatacagcaagccatgcgtcgaaatcgggatatcccctgaagatgtgattgagccaaaccgattccgagggcggcttgtagccggggaacgagcggaggtctttttcatagtggtgaaaaacagcgccctgcctgccgtccacattcgcgtatatcaccctgtttttgagcctgtgtccgtatagtccgtacggcgaacagttgccggaatacgcgaccgtcaaagccgagtcgatggaattcagcgcccgccatcctgacgccagataatgagcgccgtaccaatcgtatctgaatctttccatgtggccggatttgtaagggagcgcgaaatacagagccgcggcggccatcatcgcggggacaatcgcgcgagcgggttttcgtcccgccggggcgaaaaacgccgccgcccccgcgagcgccgccatagcgaacagcgcaagcgccggagccgcgtttgagacccattccggcaacccggccccgccgaaaaacgcgtcccgcgcgaacgcgccgaaacgcgtcgcggcccctacgttgcccaacgccaacgcgcccgcgaccacccaccatcccctttcccacttccccttccacatcgcaatccctatccctatcgcggcaagcatcagacccggagccagaaacctcgcgttattctcgatgttgtaagggttcacatgccagaacaggagaaataccgccgggactagcgcgataaccaagcgaacatgcggcgcgcggcgggttttcaacgctgcggacatcagcgagaaaaacaggactcccgataccagcggaagcgcagaagccgccgaagccggcaaaaaaccggggtaacgcgcctgcgccgcaatcgcccccgctgccgccgcgaacgccaccgcgcgcgccgcagtcgccctgccgggagccgctttcagcgcccccgcaatcagcgccgcgccgaataaaaccgcagccgcgccgccgccgagcgcccgcccgaccactatcttcccgaacgcccccatgtccgacgcgggtatgtgcaggtatgaccggaacatcgccgccctctcgaatgccccctcgaatattttccatccgaatatgtccagccccatcgggtagaacgggctgcctgtcaatgaaaggttgcgcgcgtaccagaatatgcctgcggctgctgcggcggcgaaaaatgcgtccgctctggacagaacttttttccatgactcgccgcgcgcgcgcgccgccaccagcggaaccagtagcgccagcatcaccgccccgaaatacttcgagccgacagccagccccgccgctagacctgccatcagcatgtcgcctttcgcgcgcccgccgtccgaccgcgggatcaaaaacgcgactgcggccaagaaaaatgccgtaaaataaaggtctattccgaattgaagggtttgcgcaagaacaattgggactgcggaacccgccgccgccgccgtcgccgcgctcttcggcggcatccccgcccgcagccctattacgtgcgccgcaagcgccgcagtcagcagtcccgccgactccatcagcccgcacagcaggtcgtcgttcagaggcagcatcagccacagatacatcagttcgccgttccccggatagtaggtcgtcgcctgttccgggcttagcgtctgaacgaaaactatctttcccgcgtgcagccactccgccggaaataccagatggtccagaaaagcgtccgtgggggcaggcggcatggtcagcgcaaacgagcacatcatcaagaaaaggacggcggatatgattttcactgcggccatcgccgcgcccgccatcgcgtccggctccgaatgcggcgcttcgccaaaagaaagaacgtcaggggagtaaaccgcccgcgaagatttcgccttgacgcgcgccgccgcgacaacaaccgccagaatcacgatctgcgccgcgaacgcgttcgggtacttaatcgcgcccgccatagacaacaggagcagggtaaaagcgaccgtggagacaaaaacgacgcaggcggcaagcaaccgctcaggcccgcgtcgattccccgtcagcaaccccgacgccacccacgccgccgccgctgctggcagattcagcgcgaacagcctcgcgatgtcgctcagattttccattgttgaattataccaattatttcatccgaacaaacggttttttatatgacattgaacataaactgcggaattccgctatatttcgcttgctggcaaatatgcgcctctgaatctcttcatatctccctttttctttgtttattattccggcggcgctgttaattatttcgcggtttcgtgtaaaccctgaggaatttcggtaatatagtaatgagggacaaaataccggataacatgcggcaagggagttttccctcggaacggaggcggaggctatgaaaaagattgtggcggcggcgatgatagcggcggcgatgatagcggcgtcaacggtcgcgacctttgcggctgaaacatacaacttcggcgtttacatggggccggacgagcgggaccagcagcttaaaaccgttctcggcgcggtggtcaaatacgtcgccgacatcgagaaggtcgatatgcaactcaaatggtacgacgacgaaaaggccttcaccgacgacgccgcgaaaggcgttctcgatttcgcgttcacaaaaaataccgatccgttttttcttctggccactaaactcggctatgagccgatacttggcgtgtcgcttttcgacaagaaaaccgcccggatgtgcctctactcaagctcggacacgaaaatcacgggcatcgacaaaatgaaagacctgcgtctagccacctacaaggaacacgacggctactatccgctccgcaagatgttcggagacaaaattctcgatgggcttttcaaggaagtgaaattgaacagcaacggcatggcctcgctcgacatgcttgcaaaaaaagaggttgacctcgcccttgtgcacgagatgaacgtcttttccctcaagctgttcaaccccgccatgataagcaaactgaacgagcttgtttgctcggaagcgacagttcagccggggataatgaaacacaagaacgcccctaccctgctagtcaacaggctgtccagcgtgatggaaagcgcccacaagtccgaaaccctgaaaccctacagaagccttatgaaaacaacaaaaatacgctttttccccgttaccataaaagacttcgacccgctcatcaagctatacaccgacgcggcaaaaagcggctgggataaagactacaataaatggctggccgccgctaaaaaatagttcgccgatataaacgacttattatttgaaattactcatgaattgttgctgttttcgctcacgcacaaaaaaaacattttgtgcatggcacacaaacgagtgggtaaaatcaattaagaactggcataaacgcgttaaatgaaactgccgtattcatgcttgaacccggctttatttatagacccctgagaaccgggccatttttatagcggcacactgcttctcacgcacaaacgagcttgtgagcgccgcccatgtttgtttttctgtaggggcgcggtttccgcgccctatcatggcgttgttccgggcggggcaaccccgcctctactttgaataacgcgccttgcggtccgcatttcttccgctttgaacattcgctcccgaatcctaatgatggatccgggtttaaatgaaaactccaaatctgcacatggtattatttgtagcgcacataaataatcaaggaaagaagcgggattttcaattagtattccgacacagtcgccgaatttgcctttcattcccagagcggcgaaaagcgggcacaggcatcgctggggcgcgcgctgccagtccccgattttagcgtgtaaatgtttgccgggcgggtggaacatagcctgctttcgctcgcaggacataacaattccaacaagaacaatcccaccccctgccgacattccttttttactgtccgattaaatatttttcaaagacggcaatttgacgcgcaataatgtcacaggcaacgagtagaatgcatgacaaggttgtcgcattctaattgattgacaaaaagggactatgtatctgatataataaggcggctatatcacataacaggaggcaacgctatgtttaatttagtagatgaggaatggattcccgttctatggaacaacggacaagtaagcgccatcggcattaaggaagcgttcacgcgagccggaagcatacgccagatagccgcgagcaaccctatggaccgtttcgccatcatgagatttctattggccgtgctttattggtgcaaaggcaacccgacagaaggtgaaacaaaattgaaaggagattcatttcctgccgaatggtttgaaaaacttgaagcggaaaaagactgtttcaatctgctgggagaaggaaaaagattttttcaaaatcaatcagcgaataggaagaaatcaacaacggaattgctccaagaaatacctaccggcaacaattttcgacatttccgccattcgacagataatatcaacggattgtgcaaggcatgttgcgcaatggggctattgaggctccctctgttttccgtgtccggtctgcccgacctaaaagcaggcattaacgggactccgccaatctatatatttgccatcgggcctaatcttaaggaaaccctcgtttcaaattggatgcatgttgatagtataggcaatccctcatgggtcgcgccgtcgattactaataattctagctcttgcgcgcctttgcttgacggattgacgaccttatcaagaaaggtctttctgcacaatcccgatgacgaaatgtcagactgtataggatgtggcaaacgggactttttgataacaacatgtgaattccagagcgccggagaacttcgaaacgaattatgggatgatcctcatgttttgtacacagacaaagaacctcgcaaatcattaaaagctccggatcccacatcgactgggagattcagaatggatagaccgtggccggaaacggcatctcgaatatcccaatcaaacagattcattggcgcaaatacggacaatatgattctcgtgataggtttctccacagacaaagcgaaaaatatagatgtctgggaacgaacgataagaataccgtcaaaacctgcaagcacagatacggcggccacgcttatcgaattatggaaaaaagaaagttggctgatagaaaaacagcggatcggttcgagatctgataaagaaaattcatcaatggccgcaacgatacgtcctcatgttgagcatgtggtttcgtcgcgacttgacgaattgctaaccggcgaccctgccgcatgggacgacgcctcgcgcgagtaccgaccattaatgagcgcggttgccggagctttatccccggggtttacttcttcggctctcgaaagacgcagacaaatatcccgcgtcatccccgatatgcgtgaaaaaaaatccgccggaaaatcccgcgtgaagaaaggaggaaaaaaagatgagtgaaacgcagcgctttatcgacacgctgacgaaccttaaatccggcgagttaagcctgttgcgcgctcactcaggacaaaaacttgacgagtccgtccccgcatttgatttgttcacaggaatatggtggccgttaagacaacggagtcaacgcgcgccgcgccgcgaagtggcgtggctgatagcgaaactctacgcttttcgtcccgccgtttccaacgaacaaggaaagactctcgcgtctcaacttgggagttctatgccgcgcaatcagacttccgacgagtcaaaccgccttaggcaggctttcgacaacctgcttcttgcatcccttagcgacattgagccgagtttacaatgggctttagacagaatcgagtcaaaaaaactcaatctcgattgggttaagctgaccgacgatctttccatctgggaacgcgagtcaacccgcctgagatgggcggaagaatttctaaaccgaaaaggagaataacatgctaatcgaaatccacatgatacagaaccacagtccggccaacttgaacagagacgaccttggcgcgccgaaaacctgctatttcggcggagtcatccgctcgcgcatttccagccaatgcgtcaaacgaagcataaggatgagcgaggagttcaaatctctatgcggcggcgtccgcacaagacagttggcaaaactgatttcagaaagaatccaaggcaaggcagacgccaaaaagagagctgtcgcaatactcaaaaagtgcggcatcgctcctaaagacgaagaaaaaagcgatatgttggtctacaccacaaaagaagcgatctcgaaaatggcagacctgctggaaaacagttccggcaagtccgacgatgagcttgcatcggaattcggggggcttatttctgaattgaccgctgttcccgacatggccttgaatggaagaatgcttgaaaccggtgttcttaaagacacaacagtcgaggccgcgcttcaagtcgctcacgccatatcaacgcacgaagcccgtccggaagttgattattacgttgccgcagacgacattccgggagccgacgcgggcgccgggtatgttgatgaagctttgttctcgtccgcatgcttttacaaatatttctcaattgattttgaggctttagttaaaaacttgaaaggcaacaaagaactcgccgcacacaccgtaggagctttcatccgcgccgcggcgacagtcaatcccacaggaaaacaaaacagcttcgccgcgcataatcctccagacggcattttgattgaactcaaaaaatcgcccgttagttatgccaatgcattcgcaaggccggtctctatcagcggagggcgcgacatcgtttctcagagcgtcgctcaactcggacaatacatcctcgatctggacgccggctacggtaaaccggaaaaccgattctggttctctccgaacctgcggttcccgttgcagacgatagaggagaataaagaaatcgatctctcagataacaacgtcaaatcacttgacgaactgatccccgccatcgtctccgctatcggatatgactggagcaaagtaaaagaggttgttcttaattcagaggtggcatgatgggcgaaaacacgatgtttctccgtctagaagggccattgcaagcgtggggcggacatgagtccaagtttgtcgtccgcagaacctgcgaagcccccacgaagtccggcgtttccgggattatttgcgccgcgcttggcgttccgcgagcagaagcatcctcattctggttgccgaagcttcgctctttgcttatgggcgtcagaattgacagggccggaatccgctggtgggactaccacactgtgggcgcagaaatgcagatgagcattgcggaagccgagggcaagacaaagaaaggcgcgctgctcacgcgtcgagaatatctttgcgacgcttcttttttagtcgctttgcagggagattcagcagtgatcgatcagatcgaaaccgccgtaataaatccgaaatggacgctctatctgggaaggaagaactgcgttccatcgcggccattgagcgagcgccctccggaatcgcatcctgatctgatctcggcgttgtcatctgttccttggcgcagaaggaacaaggaagatgaagcgccgcagtcaatcgactgcctgattgactggacgcccacgcaagaacagccggaagcgccggatgacgcgttagtgtggcacgatgtccccatactgttcgagccgccatcccatcagcctcggtttgtgatgctgaaaaacctctcagttggaacagaaggagatgtcaggatagcggaagacgcggcgcaaagcagagttcccgatccgccacgttcccgcgcggactattcaaactccgcatacaagaacgcgcgggccgagcggctgaactccgaccacggactttgcgttttctgcaaatctcccgcgacaacagttcagcatgtgacatatcgccgcgctggcggcaatgaatctcaagaagatttgcgctctctttgccgactctgtcacgacgcagtcaccatgatagagtacggacacggaatggggcttgaccggataaaccccgaacaccctcaatggcgcgatgaaattatcaagaaacgagaagaagtagtccgataccggtctctcgaaacccgacggagacgcctgagcgcagaggaggtggaataatcgtcatgtttctttcttgccttttaatcaacaccggcgacaaccccgaccgaccgcgtccgggaagaatatggttgcgcaatctttacagagtccatcagcgcttgtgcatggcgttcccttcgtcttccgcatcgttagccgacccggattttcttttgccattcaagcctgacggcttcgcaaaaggccatgtgcatgtccctcgcaaacctgataccggttttctgttccgcgtcgaccctcttgcgggaaacggagccgcaatcatcgttcagtccgcatcaatgcccgattggcaatatgcgttccacaacgccgggtttcttctctccgccgaaccgcaagtaaaagccttcgagcctgtcttttcccttgatatgcaataccggttcaggctccttgcaaacccgactcgaaaaatctgcaccaagaccggcgaagacggcaaaagacgcaacggaaagcgtgtcccggtggcctcagataaacttgaagaatggctacattcgcgagccgaacgcgcgggtttttccgtcgttaaaaactctctgtccttaactccgtcttatgtctatgtgagcgcgcggaacgaaaaccttaaagggcaaaagcttcgttccgtccggtacgacggcgttattacaataacggacgcggatctattcaaagaggcagtgacaaacggcatcggcggcggcaaaggcttcggtttcggccttgtcagcctcgcccggatatgaccgccatgagggacttgcgtgaactgccgaaattcgaaaatagatggagccatcttttcctcgaacacggaaggctggacgaaaaggccggagccttgctatttcacgggaccgacgggtctatcgagattccgattaaccagctaggactgcttttgctaggccccggcacgaccgtcactcaatcggcaatgcgttttcttgccgacaacaacacgcttgtgtgctggacaggcgaacaaggcgtccgtctttacgcgcacagcacgggaggctctcactcctcaagacgcttgcttcgacaagcggggctttacgtcaacatggattcgcgcatcgccgtcattcgccggatgtacaacatgcgctttccggaaaaacttcccgactccgtttctctcgacaccgtaagaggaatggaagggcacagagtcagggaggcataccgcaagctcgcggaagagaacggcgtgatgtggcgcggcagaatatacaatccgcagaactgggatcaggccgacccgctcaaccgggcgctctcatccgctttcgcctgcctttacggcttgtgccacgctgcaatactttcggcgggatattctcctgccatcggattcattcataccggcaagatgctttccttcgtctatgacgtcgccgacctgtacaagatggaaatagcagttccgctcgcgtttcaaacttgctctgaaagcgatgtcgatgtcgagcgcaatgtaagattggcttgtcgggacgtttttcataaaacaaagctgatgaaacgcgtcttgccggatatcgcggaggtattagatgctggtgatgatattggagaaatccccggcgagcttgaggggagacttgtcacgctggatgatagagccgcgaccgggactctaccttggcaatccgagcgcgaggattagagatattctgtggaacaaagccgtcaagaaaatacgcgacggcggcgtcactcagatatggagcgacacccgctctccgcaaggatatctttaccgctcctgtgggaaaccggcccggccaatgatcgatgtcgatggacttgcccttgttctttctccttacaaaactgaaaggactgacgagactttgatcaatcaaaataataaggagtcttcacaagatgattgatttgacaatactactaaaagtgttttaaaaaaaccggcatacaatatgctggtgtcttccccacgcgtgtgggggtgaaccgccgactgagaacgacggcgaccgaggcgcgccgtcttccccacgcgtgtgggggtgaaccgggggcgatatgaaatccactaaacaggccacagtcttccccacgcgtgtgggggtgaaccgtttgtcaactggaaccagatgtacagctataagtcttccccacgcgtgtgggggtgaaccgtcttcatgctttgatcctttcggtatgtttgtgtcttccccacgcgtgtgggggtgaaccgatactcgaatacccgaatcctgtatctgcgccggtcttccccacgcgtgtgggggtgaaccgtgtttcccatgttgtctataaaattgagagccgtcttccccacgcgtgtgggggtgaaccgggggtgaaatgatgagcgttttttcgcagaaagtcttccccacgcgtgtgggggtgaaccgacgaagctatgcagttgcctaaaatcctgaacgtcttccccacgcgtgtgggggtgaaccggtaaatgccccacgtgcggcgaaccgatgtacgtcttccccacgcgtgtgggggtgaaccgtaaactctaatccgtcgccgctatctgtggcagtcttccccacgcgtgtgggggtgaaccgccatcgttgtcttccaccaggccgcttacgtagtcttccccacgcgtgtgggggtgaaccgcgggtggcgacgcttacggcttcttctttagcgtcttccccacgcgtgtgggggtgaaccgcagcctttgacagatggaatgcccgccgttgggtcttccccacgcgtgtgggggtgaaccgagaagcccatgacacaaacccaactattgatagtcttccccacgcgtgtgggggtgaaccgatggaagaaacaacatctcaaaaacttgcaaagtcttccccacgcgtgtgggggtgaaccgcgggggtcggctgacggggtcggggatggcagtcttccccacgcgtgtgggggtgaaccgcggcgagcagtttgagttgcgaccgccgacgcgtcttccccacgcgtgtgggggtgaaccggagggcgattgaaatggcagaaagcaccgcaggtcttccccacgcgtgtgggggtgaaccgcccggaagctaacaaaggaaatcaacaaacaagtcttccccacgcgtgtgggggtgaaccgccgttgaagataaattgttcccatatgtctgcgtcttccccacgcgtgtgggggtgaaccgtggatcagcacttgattgaccgtgagcggatcgtcttccccacgcgtgtgggggtgaaccgaatcctagagatcatgccgtcgccgccaatatgtcttccccacgcgtgtgggggtgaaccggcttgagcgtggtcgagggcgcgattgccgctgtcttccccacgcgtgtgggggtgaaccggctaatagaattaatagaattaacgtccggaatttcggcgtccggaacaaaattgccgttattctgttttattattgattgtgaaacaaatccatcacggcgaggtttgagatattgtgaacgattccaaagacctgtttgaaaaagttaaacatctattgctcggccagtactttgctgttctttcatcggtacagagggacggcagtccgtattcaaacataatcggttttgcggctacggacgatctcaaacatcttgtttttgcgacgccccgaaacacgaggaaattcgacaatctgctcggagagccgcgcgtttcgcttctggttgacaacaggagcaacagcaaaggcgacgttcatgacgccgcagccgtaaccattctcggagcggtcagggaaatcgaccgcgtcaatgatagcatttactttgagctatacgcggaaaggcatcctcatttagtggatttcttaagggcggacgataccgccgtcatagcggtgagcgttaatgagtactgctatgttagcaagttccagagcgttatgacgttgagcatgaaataaggagacaggccgcaatgaaaatatggaagtttatgaaaagaatcgggacgaccgcggcgacgctggcggcgcttgactccgtctggctgggcgtcattatgagcgactattataaagaacatctcggagaactggccagaagaaacgacgccgggctgacccccgactggaccgccgtgatattggtttacgttgcgctgacggcaggcctgaacatattcgcggtggatacggagtccggcagcgggcgcataaagaattctctcgtcaggggcgcgttattcggattaatcagttatggcatttacgaccttacgaacatggccacgctcaaggggtggtcttgggaaatgacggtggcggacatgctttgggggacattcctgtgttccgtggcaagcgccgcgacggccgccgccgccgcaaagtgagcgtcaaatgaaactgaaccaaatcgttatcatcggagtcgttctcctgttgtcgttcgccggggggcagttcacgtcgtccggcatggactggtaccggactatacaactgccgacatggacaccgccgggttccgtcataggcatagtgtggacgacgatatacatactgacggcggtatcggcgattatagcttggagagttttcgctggggattcccgattctatcttgtggccggactgttcatgatgaacgcggcgttcaacctcgcatggagctacattttttttgcccggcgcatgataggcccggcggttatagattcgatggcgattgaaatcacgctgcttgcgctcattccggttctgtggaagaaatcgcgcgcggcgtcggttctactcctgccatacgcgctgtgggtcgggttcgcgacatatctcaattactgcatctacgcgttgaacaagacgtgaaacaggagacgcccgcaagatgaaaacgatgtttgcgcggataacttgtctgagcctgattatcgccgcttcctccgttatttcggttgcgctcgcttcggattcaggatatgtcgcaacgggcgcaaaggcgaagaatttcaaactgaacgaccagcacatgcagttggtggaactggacaagctgcgcggatcgacggttgtcataatctacaccggcagaaacggattcgacgacgcggctgaaatcatcaagaaactcgacaagaaacatagcgggcgggaagacgggaaaaaagccggcaaggatatccgcatagtcggcgcggcgaacttaaagggcgttcccgctttcgtgaagaagatggtgaaaaaccgcatgaaagagccgcgttatccttcgttcctcatggactggaaaggcgagatagcggcaacctacggttatgatgaaaaagggattgccgcgttcgtagtggatggaaaaggcatagtgcggttttcaggcaatatcaaaaacgccgacgatgacatctctaaagtatccgcagctatcgactcgatatagaatccacccctgagttcatagtagaaacaacggcggagcggcgaaaagcaggcacaggcatcgctgaggcgcgcgctgccagtcccctttttcgctcagagttcacagtagaaacatcgaatgtttattgaacacaaacagacattacgcaaacgataatcaatccccccgccggcattcctctttttgtgccttcattctttatcttttgtttcttaattcattctttcttgccgtcattccttttctcttgtgccgtcattcccgcgaaagcgggaatccattttcacccgcccggatgctatttcgcctatcagcgacattgtaaactgtcaaaagcctcggccttaccatagatgctcccgtttttaaaattgctaatttcaaacctgaccacttcttcttcgcttcttctcgcatttgctatttgtgttgagtcaggcagtcaacagctttgggattgtttgttctgcgcaatactttgattatgtattcctgtatttcttggttgtctgcttcgtcaagaagtttgcacaagagcataattgcagcgtcttttccatattcgccaaggtttcgtatacaagagttctgaaaatcgctgtggtctctgtgaatagattcattgctgggggggttcggcatttttcctctggacaaatctattctttctctgtcacgagtaatatcgttaaagtaactctgtttttcttctccactcgcgatcctttccatcacaaacaatgctttgtcctcataaccccatcttagaagacacccggcagctacgcctctaactctaatgtcattgtcatttatggcgtttgatatcacagcttgagatttgacatccaacctacataattcattggtagcattcattcgcaattctggacttatgtcagatttaattatgtcttcaagcaaggggacgatacgtgggtctcgagaatttgctatgtctactaaaacaagtcccttcgcaaactcggaagtaagatgatttttgtattgatatatttttagcggtagttcacagcaaaacgttcttctatcgtattcatatatcaaccgctgatgctttttttgctcttcttcatccatatcatcgaagtctttccggggatcaatatatgatggtttccgcgaagaccaaacagggcaccactcgtcagctctgaaagaatcagatggattatccagaaacttatttaaaacttcctctcccatctttatctcttcatccggacacgctttcaaacccgtgaaatcatctgcggatgcgctgacaaaagcaatcaatgtccacaccaagcagcacagtatcatcagcaaaaccgcatatggtggagtcaggcggagcctgtttacagaattagagttgatctggttggctgatcttgattttgtataagcacggctgttgtagggatagttgttcggtcgcggatgtgtggtctgtcgcagcttcatggcggttatgttgccattatgaacgaaggagaacgatttggcaacggggggtgggaggttgtgtgttgtggagggcggatggggtggcttaaggagtgggatgctaggaataaattcccggaaaggcaaagcggcaatgaattgccgcactccaaagttccacattaattttggctgatccttaggcataggcagaaacgagtttggggggcgcgcccggagggacaagagcgaagcaggtgtgggcgctaaagctcaaggatgtcggggcgggacaggcgggcgccttggaaatcaacttcgagttcgggccattcgcctgtgcgggtgatgaattcggcgcggtcggcaaacgcgattatggtgtcttctgatttcgtgcctgtaatggaggggttccatgcgaaagcgcaattgggtttgacctcgccgggggtgtcggggctggcgcagaagtatcttgacttgtagccgcacgggccgccctgatggtgaaggagccattcgtggtcgaagccttcgctggagtaaacggcggtggcgtcgcggaaaacggaggaaatcttcgcgccgggtcgggtgagcaagttgaaagccgcatcgacgcggcagcaggcggcgtgtctgcggcggaggtcgtccccggcggggccgaagctgaccatccgagtggcggaagccacaagcccgccccttctggcgcagaggacaagcattgcggctcgctcaaggggctgccgcgtcggcagaggatgcctgtatgccgggagcctgcctccggaagctacgaggacgacgatcggctgcgcgtcccgcgtccagcactcggaggcgagcgcggcggcggcggcgttctcggtcatgcccggacgcaaagccctcgcggcggactcgagcgcggccccggcgtccgctccgagcgccctgaacctgtccatctcgctttccgtcaactccatcatcaggtcggagaaatcctcgcccgccgggacgaagccggaggccggcatgtccgccgccgccacgcccgcccccgcgcacatccgcgctatcttcgcgttcctgtcgtcggcccatggaatctcgacaagctccacgtccagcccgacgagttcctcgtctctgattcttgcggactcgattcggttggtcacgaccgcgcatcggtctggaagcagaacaaaggaggcgacgcccgcttcggcggccatgttcacgtggcaactggctccgcaagcggcccacgcaaagttgtccgaccgcgatagcgccagcgcgccccagccccgctctttcattctctcccgcatcctgtctatctttatgccgaattcttccgctctggtcattgttccggccctcaggttattgtttgtcgcgacgccgccgcgattcggatattatatcagttcttaatcggttttgccgattgagagcgcccgcaacggagttgtggacgccacccgtgatgacagggttgcggatagcgagcgcgctgatagctaattttatttaatcgctgatataatgattcgaggcggttgcggtggggacgccgcgaaacttgcgcggattcgcgtattgaaccggagaatgcggggcgcgaacgccgaggagcgaagtatgttaataggaattatatccgacactcacgacaaccttgaccggttaagagcggcgatatcgacgctgaaatcccgcggcgccgcgcggcttatccactgcggcgacatcgtttccccgttcgttgtgaaagctatcgcggaagccgggttcgaggagtgtttcggagtgttcggaaacaacgacggagaattgatttatctttccgaaacatttaagaagatagggcggatagagaagccgccggctttcatagagatgggcggagcgcgttttgccgtgcttcacgagcctatgccggacgacgcgatggcggcgctgccggtggacgccgtgctgttcgggcacacgcatcagcctgttctcaaggacggcaaacccgtgatagtgaatcccggagagtgttgcggatggctgacaggcaaatcgactatcgccgtttttgacacggcggggatgaaggcagagctaatcgagctgtaggcgcgaaagccgcgaggaggccgcaagccttcggaggaaacagatgaaagttaaaatggcgataatagcggcggttctggcggcggcggtctgcgctccggcgtcggcggttcttccggacgcgcgcgggccaaacgcctctgtagcaggcgaaaactccgcgacgatgaaagaaattttcaggataaaggtggagaacgcggcgggcggagcggtggaagtgagcgaagacggaggcgcttcgtggacggccgccggaaaagtcctgctggccgccgggacgataaatccgcgagcgtacaccgccagcggctgggcgtcttcgggggctgtcgctgcgaccgccgtaaacgccattcacataaaagtgcggcagaacgaagacagaggcgcggtgttcagcatcctgcccaaagatttcttctctccgccggcggattataaatctttctattcccggaacagttcaataataacgaatatcccggctggagggagcattttcggaggagccgaatcgccgttcataggctcgcgggttctcgcggcccgcgccggttccgctcactccccaatcgccgaggattatacgccgtcagaaggcgattccctgctgataatcgtcgaacagccggagaaatatccatcggaaatcgtcttcgaaaacaggttcggagggttcatccttataaagtatcccggagaggaaccgaaactcatcgggcaggtgttgaaaccggtggcgggggttggaaggttcgaaggctcgctgtacacggacgtcgggagaatcagggcgaaccacacgggagtcatctgcgtctcgacgtcgccggtgggagagataggcggttttcagataatccctgaaaaccacgcgatgagcgcggagatggagaacgcgaggctgctgacgcagtggatggtggtcgggccgccgggggcggcggacccgtcgctcgaaggggtggctccgctgttcaggcatttcatcaggccggtacatttcaaaagcgggccgcagggaaaaacgcttgaacaggctttgggggcgttcatagttcaggcgcggatcggcggcggggagtggacgcggatgccgtcggtgtccgggcgggacgacaaagctctgaaagacgtcacgcacatacgcatgctgttcccggtcgaatggaaacattagccgggctatcgcctatgcggggcggccgggctttgcgggttgcgggcgcggggtatacaccggggcgcaaatgcgtataattgagactaggcaaggaaagcgggacgattaaggatgtcggaattaagacgcgaccccgtgttgggtcgatgggtgataatatcctccgagcgcggcgacaggccgagcgatttcatcgcagcgaaacctcttccgaaaacgggcttctgcccgttctgtccggggaacgaagacaagacgccgcctgagatagacgcggtgcgggactcgtgcacggagccgaacaagcccggctggcgcgtgcgcgtggtgtcgaacaagtatcccgcgctctcaatcgagggcgacctcaacaagcgggcgcgcggcatctacgacatcatgaacggcatcggcgcgcacgaggtcttcatcgagacgcccgaccacgacaaaaccatatccaccctagaaccgcaaaacatggaacagctaatgtggatgtacagggaaaggatgatagacctcgagaacgacgaacggttcaaatacatactgatattccggaacgcgggtcagtccgccggggcgtcgctggctcatcctcactcccagctcatcgccacgcctaccgtccccaagagaataaccgaggagcttaacggcgctcaggaatacttcgacttcaaagaccgctgcgtcttctgcgacatgatagacgaagagagggactaccagagaagggtcatcagcgagaacgaccgatttattagtttcgcgccgttcgcgtcccggttcccgttcgagatgtggcttgtgccgaaacatcacgaccccaatttcgcggacttggaagactccgacatcgcgtctctggcgcagtgttttcagaagtcgctcaaatatctggacaaggcgctggacttcccgccgtacaactacatcatccacaccatccccgtgaacaccagccgacagtacacgtaccactggcacatagagataatcccgcgcctgaccaacatagcgggattcgagtggggcaccgggttctacatcaatccggttccgcccgaacaggcggtggagattctgcgctcggcgaacggagacacgcaatgagcgggggcgaactgagccacatagacgaaaaaggccgagcgtcgatggtggacgtgtcggaaaaggaacgtaccgcgcggcgcgcaaccgtccggggcgaagtgcggctcaggcccgacgtgatagacaaaatactgtccggcggaatctccaagggagacgtgttccaagtcgcccgcgtcgccgccgtgtgcgccgcgaaaaaaacatccgaccttatccccctgtgccatcctctcagcctgacgaaagtttccgtcgagttcagcgccgacagagacgctggaataatcgttatcgacgcggaagccaaagcgatggacagaacgggggtggagatggaagcgctaaccgccgcgaccgtggccgccctcactatctacgacatgtgcaaagccgtccagaaagacatctccatcggccctttccgccttatggaaaaagaaggcggcaagagcggcccttataaaaacgaagcttgaacccgaacttgaagaaaaatatttgccggaagaaatcagattaaaaaactgtcgatggttgaccgcgtccggaggcgttcagaatgaaggcaaaaacaatcgcgttggctatagttgcggcggcgtttatggcgggcagtccccgcgcgctcgcggacggaggctccccctcccccgcttcgctgagggttctcaccgcaaacgtcggcaacgcggacatactgaactgcggcccgaaatatttttacaaactgtgtctcgtggaatgggagaagaaggtcgcggaagggatagccaagctgtcgcccgacatagtgtcgctgcaggaagttctggacgttcagtggtgcgaggcggcggccgtggagaaaaacaagaagaatgtgtgcttccggtttgaggacaggaaagagaggcatcaggttcgcaggctgttgggagatgattatacgatagtgtgcgacgggcgcgccaactacgagtgcataggagtgaaaaaaagcgtcgggacgattgaaggttgcgggcgcggagaactgtgccgcgctccgggctggccgctgacaatcgaaacgccggaaggatgctcgacaaagacggtcgtgttcggggcggacgcggagattaatgggaaacggctgaggatagtcaacgggcatccgtcggcggcggacgccggatgccgcgccgaagagttgagaaggttgttcgagggatacgaagggttcccggcgcttgcggccacggacagtcctgcgattatcatgggcgacatgaatatggacccgtttcaatgggacgccgcaaaagacgacgtggcggtttggctgaagcatgttggggatggcaagaaatattactatctgagcggtcctgcggaaaacgacccgccgttcaggacatgctccgggttcacgctggaccacgtgataacgaacgcggcgcgcggctcttgcgtcacgctggggcagtcgcccgggacggaacggctggacgggcatccgaagggggctccgattcaggaagcgcccgaccatttcgctattctttgcgaaatatccctgcctgacggggattgacggcgcggcggcaatcggtttggagcgggatagacgccgttctagggccgatttaaataaagttgcaaaaatatatctcaataacaataataatgcctgttggcggagtgtcgcggaacgaactgcgacgcgcccgtcaaaattcatcaggggagtgccgcgatggataaggaaaaagaaaaagaattagtaaagtcgtatctttaccttaacgccgtccttcctcagcttgaggagataatcgcgtatgacgcggaggcgcgcgagctgacgaaaggctggaactgcacgatccagatgcacgtgcccggcggggcgggagtcaggttcgtcttcaaagacggcaaatgcgaggcgaaactgggcgctgtgagcatgcccacaatctcgctgaggattccgacgccggaagccgccaacaaaatgatagagaacaccggcacggtcattcccatgatatggggcttctggaacatcgggaaactcggaaagttcatgaagctgacgaaactcatggagaagtatctgagaccgtcggaagaagatctcaaaaacaaggacttcttcgagttccatacgcgcgtgaaactcatgatggccgtctatggcatgaaggccgtcggagagcacgacacgtatgtaaaaggaatagtgtcgaaagtgccgaacgggccgatggagataaaggtgctgccggacgggccggtggcgcatatcgtgctggacaacggaaagttcgctgtggccaaagggccggcggcgaacccgatggtcgtcatggaaattaaagacatcaagctggcgtacgatatgctgaacgccaatgtagagttcatggaagagctgggcctgtgccgcataaggctgcgcgggcacgtcggaatggctgaaagcctcgcggtcgttatggagcgcatcggcctgtatatcagttgacgccggacgactatacccaactggagggcttgaaaatggaaacttacaaatttgataaatcatacgagtggttcgagcgggcatgcaaagtcattccgggcggagtgatagggcacaaacaccccgcgttcaccgtccccggctcgtatccgtatttcgcgactcgcggcgagggaagccactactgggacccggacggaaacgagtacatcgactggatgtgcggtttcgggccgatggtgctgggatacaacaacccggtggtggacgcggcggcgcaggaacaggcaaaactgggcgacggcatgagccatccggggccgatcagcatcgagtacgccgagatgatggttaaactcaccaagggcatggactggtgcgtgtacggaaagaacggcgcggacatcaccacatggtgcatgaggctggcgcgcgaatacacggggagaaagaaaatcctgatcgcgcgcggcgcgtatcacggcgctcaggcatggtccaccccaagctacggcggcatcatcgacgaggatcgcacgcacgttcacttcttcgaatggaacaacctagactccttcatggaactgatcaacacatacaaagggcaggtcgcgggcgtgatgatgacgccgtaccaccactgcatatacgcggaccagcagatgcccgctcccggctggtgggaagccatcggcaaagtctgcaaacaggaagaattgattctgatatcggacgacgtgcgcgccgggttcaggctcgacatggctggcagccacgcctacttcggatacgagccggatctggtctgctactccaaagccatagccaacacctacccgatctccgccggtctgggaacgaacaaactgaaagagaccgccgaacacgttctgttcacgggaacgttcttcagcagcatggttccgatggcggcgtccatcgccaccgtgaaagagatgcagaggctggacggagtaaactacatgatgaaaatcggcaaggcgctctgcgacggccttgtcagcgtaggcaaatcccacgggtttgagattatcatgtccggaccgtacgacataccgttcatgcggttcgcgcgcgagaagaacttcatgctcaaacagctcttcagcggcgaggccgccatccggggcgtcatcttccacccgcaccacaactggttcacctcctgcgcgcacacggaagaagacatcaagaaatcgctcgaagtggccgacatcgctttcaagaaagtcaaagacaaatacggaagcgactgaagcgcgacaaacggatagacgcagtaaatccgcctttaaaagcgcctccggcggccaaagagaaacttttgaaaaagtttctctttggaatctcttcaaaacttttcacatgagcgcggcggagcgatggcgcgaacgcgcccgctccgccgcgcgcatagaaatgttttgagggaaaacttttttaaaagttttcccttaaccgcattaaagcgcctccggcggttcaaggaaactttgaaaagtttccttgaaaatccttcaaacttttccttgcgcgtcggtacgggacgctgacgcgtcccgtaccgacgctcctgtggaaatgtttaagaagaagattcctcatgaaacccctttctcaatatcttttcgcatgatacgcgccgatgggaagagcgaagccttcccatcggcgctagcgcgaaaagttttgaaagggtttaagggaatactttttcaacgttccgtcattagtaatacgtatcatatacgaagaactaaatgaaagctcccatttactatttggtaaaaagcatcatgcgcaaaagaaatagttttgcgcatggcacaactcttagcgagtatattctgctataatattagaagtaaaacacgaaaagcttaactctgtttttcacattagaacaactgcgacaggagcgcggctgaaactttgtaagctcgccataatacgcttgttcatgtgttaacaacgattcgcgcgcgcaacgtttaatgatttggagcaaggcaatgaaagaatcaggaatactgcttgggttttatgtggaccgaaaagaagctaatgtggcgtttaggatgttgcgacgccgtcattttcgcagaaccgcgataatttcaaaaaccgcctccggcgtggttcgcaaaaacgccgcggaggatagatattggacatgcgtaggagcggtcgcaggcgtcgcgattggaataataattgcgcatctgtcttttggaacattcgaggcgatagtggcatggcgatgcgtagtcggactattgcttgcggctgccggcggggcgattgtcgcaaggctggcggtttatgtctttcagtcgagcgaggatcgcgattttacgaagaagcgatcccgatggcttgtgaatgaagaaacggccgtcatcgtgaaagctccgttggagtcgctggatcaagctttggcgcaaatgcgcgtcgccggagagacgcaaccctcgatttttgtttttcaccatgaccgggtcacagaggcggaatctggatctgacaagaatgaacacatgacagcctcgcagttggctgtgcacgcgagactgctagccggatatcatcgcgttcagtcatatatgggcgtcaagccccatcttcttgagcttgtggatgtttgtgttaaggagatagacctttgccgccgtgaactcgccggggcgtcgcgtctcgaacagcgcgtttccccttcagcggaatggattcttgacaactatcatctaatcaaagccaattacgacgatgtgcgacgcaacctgcccggaaatttttatcgagaactgcctatgctggccgctgagcaggttcagaacatgccgaggatttactgcatagcgtcggaccttgtatcgcatactgacggccaactggatcgtcacaccatattgaaccatcttaacgaatatcaagcggtcagtcctttgaagatgggcgagttgtgggcgatgccgcttatgcttcgcatcgcgcttatctcattcataagaaacctaaccaatcagatgacagtgtggctgagagagcgcgagaacgccgacttctgggccaatcgacttctggtcgccgcgcggctcgcccccgacagtcttttttttcttctgtccgaactggagcgagaacagcctgagcctagcgaccacttcgcgtttcacctcaccggacatctcttcggggagagcgaggttctcgcgcacgttaagagttggtttgagcgcaagagcggcggcgtcttggccgacagcgcgattcgcgagcaggcgcgacaggccgcgcataacgcttccatcggcagcgcgatagccagtttgcgccaactgtctcttattgattggcgggatgttttcgaagacttgtgcgtggttgagaaaaaactttgcgaggacccgtctggggtgtactgcagcatggattttgccacaaaggacagatatcgccatgcggtcgaggaactggctcgcggcggcggcgtttccgagcaagaggcggcggaggcggcggttctgatggccgacgcggaagacaagccgcttgatccccgaaaaaaccatgtcggatactatctgatcgacgagggccgtccgcgtctggcctcccaactggcaagccgggaaaccctgcggcggcgaattcttcattgggtctatcgcaaccacacggtcatatatatttcatccattctgcttccgacggtcgcggcggtcgccgccgttgcggcggtcagctctttcgcgggagggagcgcggcgctaaccgcgcttgcgtcggctctctcatctctgcctgccagccagatagccgttcaggcgatcaactaccttgtgacgcgttttttgccgcctcgccttctgccgaagatgtcgttcgaaaaggagggcatccccgacgaattccgcacgcttgtcgttgtgcctatgatgctctcaaacatcggcacggcgcgcagggagatcgaaaagctagagatacgctatctagccaatccggaaccaaatctcctgttcagcctgttcagcgacttcaccggctccgacaccgagcgcgacagcggagacgccgaactccttgcggccgccgtcgatggaatcaacgcgttgaacgaacgccacggcgcggggcgttttcttttgtttcaccgcgaacgcgtgtggacggagtcggagcagtcctttatcggatgggaacgcaagcggggaaagcttgagattctaaacaggttgctgaacggcgaagcgcttcccgacggacagcagatcgtccgcgcgggcgaccctgacttgctgaagaacgcgcgcttcgtcatcacgctcgacagcgacactcaactgctaagagacacggcgcgacgaatggtggagacaatcgcccacccgttgaaccgcccgccgttcaaccccgcggacgccgtcggctccagcccgtacactatcattcagcctcgcgtcagctcaagtcttcccagcgcgacggcgaccgccttcagccgcttgttcacagaccccatcggaaccgacccgtacacgaaagcggtttctgacgtttaccaagacctctccggcgaagggtcgtatatcggcaagggcatctacgatccgcgagcgtttcaccatgtcttgaagaaccgttttccgttgcagaggattctcagccacgacctgatagaaggggcgcatcttcgcgtcggctttgtcagcgatatagaactgctcgacgaatttcccggcgactatttttcctatgtcaaaagagagcatcgctggactagaggcgattggcagattgcggactggtgcatgccgaaagcgccctcccctgacggcaaacgcgttgcaaatccgctcagcgctctgaatcgatggaagatttttgacaaccttcgccgaagcgttgcgccggcggcgtccgtgttgtttctcgcttcgtcatggctgatatcttcgggaatgggcgctgcggcaagcttaatagttgggttatcggccttcttcccggtgttttcggagcttgtcacgcgagcgaccggcaagcgcggggcggaccccctgtcatggcgacaactagcgcacaacgcgaaacgttgctgcgcggaactgcttttcctgccgcacagggcagctatgtccatagacgcgataattcgcgtgttctaccgtcgtttcgtaagccatcgcggactgcttgaatgggcgaccgcgcaggcggttcaacagaaagcgtccgaacggcttcgcccgcttctggctcaactgtgcgccgtcagcctgttctctgttgtcttaggaatcgcgatatttctgtcgcgcccggataatctctcgatctctttgccttttcttttgctgtgggcggcttgtcctatagcagggatgcgtctgagcgcgccgcgccgcatcgcgcgcgcgcgccctatcgcccgcgaagatgaaatcatgctcagagtcacagctcggcgctcgtggcgctatttcgaagacttcgtaggcccggaaacatcttggttgcctcctgacaactttcaggtttacgccggaaacaatcttgccatgcgcacaagccccaccaacatcgggttgggcctgctcggcaatctgggcgctctcgatttcggctacctgacctgcgacgaggcgttcgagcggacggcgaagtgcatgaaaaccatagcccgactcgaaaaatacaacggacaccttctcaactggcacgacatcaagacgctcgaccctctcgaacccagatatgtgtcgactgttgacagcggaaatctgcttggcagcctgtggacgctcagcgcgggctttcaggaaatcatcgacgaacccgtcatcgggccgcaggcgttccacggccttctcgacacgctccgcgcgctgcgcgaggcgcttgagaaaagcgacagagcgagagttcataacgaggcgttgaaatttctcgaacaacaactggccgagcctccgaaacgactgtgcgaactcgcgactcggcttttatccttgacaggcgctgtcgcagagttgcgccgggccgtgtgcgaaaacgccgcgccacgcgatgaggccgcgcactgggcgaaccggactgaaacaatgcttgcgtcatggcgcacgctgatagaccgctatctcccgtggatggaagcgattgcggaagagacgaaaaccgccggcgacgagacaagaaacggcgcgattgcggactgtcttgaggctctggaaaaagcgccctccatgcgacagctctccgagggaaattttttactgtcgaagacggcggcaaatgatgaaaacaatttgaacgaaccgcgacgattggaatgcggacagcgagtcgaagacgcttttgcccgcgccaaatggatggccgccgaaatgctcgaccgggtcggcagcctgttgaactccgtcaacgagttgtcagaaagcatgaacatgcgcttcctgtacgataacgagcgacggctcttctctataggatttaatgtgagcgagcaacggcttgactcgtcgcgctacgatttattggcgagcgaggcgcggataggaagccttgtggcgatcgcgcgcggagatgtgccgggcaagcactggctggcaatggcccgtccgtacggctccgcgggggggccgccagttttgctaagttggacaggcacgatgtttgaatacctgatgcctcttctcttccagaagtcttttgaaaattcgctcttggaccacgcatgtcgggaagcggtgcgcctgcaaatcgcttatgcccgccggagaggcgctccgtggggcgtttcggaatcggcgcacagcgccgtggacgcgaatagaacatatcagtatcaggcgttcggcattccggcgctgggactgaagcgcaacttgggagaaaattttgtagtggccccttacgcatccatgctcgcgctggccgtctcgcctcttgaagccatccgcaacctcaagcgtcttgcgcgcatgggaatgtcaggcgactacgggttctatgagtctattgatttcacccgcgaacgaagccgcgaaggcgagcgcggcgtaattgtcgaagtttatatggcgcaccatcaagcgatgagttttctggctatcgacaacctcgtcaacaacagcgcgattcgacggaggtttcaccgcgacccgagagtgcgggcgagcgagccgcttttctatgagcgctctccggcggctccgcctatctaccaaggctcagaccgggagcagacttctttccatgccgcgccggacgaaatcgctccgtcaacaagcgttttcaacacgcctcattccccacaccctaaaacgcagatgctttcgaatggcaactactctctaatggtcacaagcgccggaggcggctatagccgatggcgagacttcgacatcactcgctggcgggccgacacaactagcgacaattggggtttcttctgctatatccgcgaccttaagagcaagcgggtttggagttcagctttccatccggcgggcggcgacattgagaactattcagttagcttcaagcttgatcaggcggagattcgccgctcggacgatggaattgaaacggaaactctcataatcgcggcgcctgaagacgacgtggaaattcgccgcataacactcattaacaggtcaggccgcaagagagagcttgaggcgaccacctacattgagcttgccctcgctccgcacgactctgacaggcagcacccggcgttcagcaagcttttcgcgcagactgaaacggagcctcggttcggcgctctcatagccacgcgccgcgtaaaaaatcccgacgagccgaggatatgggccgcgcatttgatttgtatgccggagcaggacgagcccgccgacgagctggagttcgaaatggatcgcaatcgcttcataggtcgcggtcgctccttgtcggaccctgcggctctcggcaataaattgtccagcgtcgcggactcgtccatggacccgattttcagcttgcggcgaaagataacgctcgaaccgggagcgcgccgcgatttctccctcattctctgcgccgctgaaactcgcgaacaggtcgttttgctcgctgaaaaatacttcgaccccaattcggcgtcccgcgaactagacatctcatggagccattcccagcttgagcttcgccacctgcgcattaacccagacgacgcgcgtcgattccagaaactcgccggctcgatgatatatcccaactcccggctccgtccatggagcgacctgctgaaacagaacaaacttgggcagtctcgcctatggccttatggaatatccggcgaccttccaatcgccgttgtagttattaaacaggacgcggacatcgacttggcgcgccaagcgctgcaggcccacagctattggcggctgcgcggcctcaaggcggacctccttatcataaacgaggaatccgcgggatatgaacagcctctgaacgaacaactgaagcggcttgtcttcagccattcgatgaacacgggcgtggacgtgcggggcggcgttttcctaaggacagcaagtcagattcccccggaagacatcaaccttatgttggcggcgtctcatgtgtcgctcgtcgccgcgcgcgggcctctggcccaacaactcagcattcccgccgagaccctcagaacgctccccccgctcgccgttaaagccatcaaggaagagccctccgcgcaactcccgttcatcgaactgccgtacttcaacggactgggcggcttcacttcagacggcagggaatacgccatcttcctcggccccgaacaacagacgcccgccccatgggtgaacgtaatcgccaacccctctttcggaactcttgtcagcgagtccggctcaggcttcacatggcgcggaaacagccagcagaacaggcttaccggatggtctaacgacccggtttgcgaccctccttcggaagtcgtttacattcgagacgaagacacgggcgcagtctggacgccgactcctctgccgattcgcgaacgcgacgcttaccgctcaagacacggcgcgggctacagcgtctttgagcacaacagccacgcgatagaacaggagcttacgatgtttgtgccggtcaacgacgacggcggggaccccgtctgcgcgcgcaggcttaagctccgcaacgactcgtcccgcgcaaggcggctgtccgtgactttctacgtggaatggacgttgggcgagcatcgagagaatatgcaggcgcatgtcgtcgccgagtatgaccgcggctcaaaaatgatattggcgcgcaatcgctaccgcgcggattacagcgaaggagtcgccttcgccgcgacaatccctgcggcgagcgcgcacacaggcgaccgcgcggaattcataggacggaacggaagcctgtccgcgcccgcggcgctcaagcgagccggattgtccggaagagctggcgccggatttgatccttgcgccgcgcttcaggtgaaaattgagcttgcgcccggcgaaagaggcgaaatcatctgtctgctcggcgaagccgacaacgcgaccgaggcggccgctctggttaataaatatcgcgacggcggctccgtcgcgaaagcgcttgagcaaaccgccgcgtggtgggacaaaacgcttggcgccgtcagcgtcaacacgccatctcattcggtaaacctgttgctcaaccgctggctcctctatcaaaccataagctgccggctgtggggcagatcgggtttctatcagtcgggaggagccttcggattcagagatcagcttcaggatgtcatgtccctgctgtacgccgctcccaagcttgctagggaacatctgcttcgcgccgcaggccggcagttcagagagggagacgttcaacactggtggcacccgcagagcggggcgggcgtcaggacgcgatgctccgacgacctgctgtggctgccgcacgcgacggcgcagtatgtgcgcatcacaggggacgcggaaatactcaaagaaaacatcagattcattgatggccggacgcttgacgaggaagaatacgaagcctttgggaatccggttgagtcgatcgagagcgccacgctgtatgaacattgccgtttggcgattgagcgcggctcgacatccggcccgcgagggcttcctctcatcgggactggagattggaacgacggcatgaatcgcgtcggaataaatggcaaaggcgaaagcgtgtggctcgcatggttccttgtggacgcgctcaaacagttcgccgcgctcacggagatggttaaagacgcgccggttgcggcggagcgataccttgagagagcgaagcgtcttgcgaaggccgtcgagaaacatgcctgggacggcgactggtataagcgcgcgtggttcgacgacggctctcccatcggctcatcgaagaatgaggaagcgatgattgattcgctgccgcagtcgtgggccgcgctgagcggcgcggctgaccctgcgcgcgccctgcgcgcgctcgaatccgccgcagagcgcctcgcgctcaaagacgagaatatggttctgctgtttacccctcctttcgacgccgggccgaaggaccccggatatatcaaggcgtatccgccgggagtcagggaaaacggcgggcaatacactcacgcggcggtgtggctcgccatggcgtttgccagaatcggcgacggaaaccgcgccgcctctatcctcaaaatgttgaacccgatagaacacgctcgcgaaccggaagcggtcgcccgttatgctgtcgaaccttatgttgtcgcggctgatgtctaccgacttcccggtagaacaggacgaggcggttggacgtggtacactggcgccgccggctggatgtaccgggcatggatagaggatgtgctgggaataaaaatcgccgccggcaaactgctctttgatccggttcttccatcagaatgggacagagcaagcgtcataatccggcatgaagaagccgtttatgaaattgaaatcgagaaccccgacggagttaaccgaggcgtcgcatgggtggagatggacggccaacgtctgaagaacacagagattcatctcgatggagaattggtcaaacaccgggtgcgcgttcggatgggggtttcaactcagtgaaaccagcgcgctttgaacatggctttgaagtgattgctaaaagaatcaaatgacgaatttgggagcgatgcgctgagcggatagttcgcgaggcgcgagcctcatttttgaaatagggacgcggtttcctcgccctgtaaaggcgatatttcggcgcccctgcttcaattattcagagagaccgaggcagagcgccgctgtgataattgcccgcgtttcgccttctctatctgcgaatccgagttcatttggccagcgtctcggagattgttttcaacaaaacttcgccgatgaatggtttctgaacaaacgcgcgcgctccgtcgttcattaatcgcatggctttccctgcgacgctgaatcctgaacacaggatgactttgacgtcattccgtatttgccgcaaagccgcaaacgtttcggctccgtccattctcggcatcatcatgtcgagaatcaccagtctgacatcggcttgattcttcttgaacaaatcgagagcctctttgcctccgttggcggcgattgaactgtatccttgctcaataagaaaatccgacatcatatctgtgaagtctttttcatcgtccacgataagtattgtttcttttttgcccttccgcaatgtttcgtccgcttccggcttgtaggccgttggcgcttccttcgcgcatggcagatacaccttcactttcgttccttcgcccggtttgctttccacctctatcagtccgttgtgcgtctcaactatgctcttggtcaccgacagccccagccccgtgcccgcgcccttgtcttttgtggtgaaaaacggctcgaatatttgttcgagcatatccgccggaatcccgccgccttcgtctcgtatgtcgataagacaatattctccgggtttaatccctctgcgagaactgcaaaattcattgtccagataaacaggagccgccccaatctctagtttgccaccctccttcatcgcgtcgcacgcgtttgcgcaaatgttgagaaaagcctgtccgagttgatttgcgtccccgcgaatcaggatatcgcattccggcgtcgttatttcgatattgttgaggacgctgacacgcaatatgtccactgtgtcaatcaggatatcgcgagccgaagcgtcgcttatttccagtttttcctttcttgcgaacgtaaggagtcggcttgttatgtttttcgcccgcattgcggacttaattatgcgtcgcatgcgagcttggttcgggtcttccggcgacatcgagcctaaaacgacttccgatgttccgataataacagcgaggatgttgttaaagtcatgagatatgccccctgcaagccggcctaccgcgtccatcttttgagactgtatcagttgttcttgcgcgcgcaaaagctcttcggtccgttcctctatgacttcttcgaggcattcccggtattgtttaagctcatgctccacgcgcttgcgctcagagatgtcgcggatgttgcactggatcgcataggcttcgctctcaagatatacgttgctgacgaactcaacgtctactgtttcgtatgtgaccgagttcgagtcgatgattcaacgccgtagatcgccctttattcgttttttcggatttttttaatgaaaaatccgggatagatggaagtcgcaagcctagttcaaagcgttctcagaataacgctcttcacgcatttgttccgacaggcgctcttttgctctgtgaattcttgatttgactgtgccggtcggaatcttcatggctgatgatatttctgaatatgtgtatccgttgaaatgaaacattgaaaacaccagcctgtacatctcaggcaacgaataataacgcctcattatctcttcatttatatggttgtgaaaaaacaccgtgtcaggcgagtccatgtgcgatattcgtcgcgcaactttcaatgccaatttgcttttgtcgtgttttctatcgtcaaaagagatttcttgctctttccttctttttactttgttgatatgcgtgttaatcatgattctgctggtccatgcccggaaattcgtgtcaggcgcaaaaccgccgtaaccttcgcaagctttgagaagcgtttcctgcagcaggtcttccgcgtcttccgcattgcttgctatctgcaaggcgcgagaccacagatatgtcttttctttatcaataagtttttccacgtcttcgcggaatgcttccgtcatagtcgctctcctgttcatgccggaaacgctttttaggcgcgggcctcgacatcgttttcatgcgcaaagactcagaatgtattctgcccgtcgcgttgcgcgccattgctcaacattaggctgagatcgcttttattttgcggcggcgacattgcgctgagccagttgcagataaaagaaagcgtgttcgttgtcgggacgtattcgaagagcttcgcgccattcaggaatcgagtccgcgaagcgcccctgttcgaacagtatgcgagccgtccatagatgcgcggccgcaaaatcctcgcttgcggtcatcgcctctctgaacatgtcaagagctccggatatgtcgccaccctgatatcgggcaatgccgctccggtgcgccacatacgcgttgcctccgttctctctatagttcgcggcgtctttccgcatcatcagaagaacttcgtcttccggagcctctttgatccctttatccagaatagccagcgcctcgtcgtacatgccttcattctggtaaatagtggcgagccagacgtacgcgtccgccagtttcggatcaagcaataatgatttctcgagttcttcaaccgccatccagtaatacccgcctgttatatatgtgtttgctccaagccagcggcggcaatctgcggcgcgcttttttacatcttctatcctccagccttcggggtacatcgttatgtaataatcccaccactgagccgctttgccccaccatttcgcgccctcgtacgcccgggccgcttttgttataacgttcccgtctctcggattgctttgcaaatgcgtttcatagtgcgcgatggcggcgcggtaattttcgctcgccatcgccctgtctcctttttccaccgatgcctcagcaaccgcgcttgccagcaatgaaaacgcaagaatcgtcgcggcaacgatgttgcgtcccgccgcgcctcggcttgaaccctttgcgcaacacaagcatctcagaatgttcattgcttctatcttcttgtaatgtttcattatattcctccgcgcttttctgtaataacagcgctatttgcacaaatgcgctttttaacaagtcgtctcttgttcgagcaaaacgcattagctcagcctctttctaattccttgcgtctagcgatgtcggttaagcttcagtctcttgctttttcgtgtgaatcaggtccgccaccgcatcgccggattcatccatcgcctttttcatgctcttggtaatatcgcgcgccgtgtcggcgacatcctcttttcgagcagcgatcttgtctatggctttttcaacgttgtccgacattttatccatagccttgtcaacgcgctcgcctagcgttcccttgtcgctcttgcttttatcgacaacgttgtcgatgtgttcgccgatcgttttcttttcattcatgttttgtttctcctttgtatttgtttgctgcgtcaatgatacgtcgctcgcttaacaatcgctatcggctaaaaagcatatgtttgtaaccatcgcggtttatatatttagccacatcgactaacggatgaacacgaagctgacttgatgacggattgcgccggacactaatgctcgctctgccgtcaagaggcgacaaccgccgccgcaaggctgtctcaggcaacaagattgaacaggaaaacattatttattttagtttgaagcgcaggcttcgcggagacgaggcgtttcgggcgcgttcgcgttcagataatccgttagagacaacaatttaagcattcgcatcacattcgcctgcaagcattgcaattcgaatgagccgctccatctgtcagtaagcgttcttaattgcgccaaaagccccgcgccggcgcagtcaagaaaagtcactcccgccatgtcaaacgaaagggacactccctgacgcatatactcgaacacaaggtctttaagtctttggcatacatcgtaagccagttcaccctcggctaatatcaatgtggtttcattctcattaactatatcgcaactaaacattgtttcgcatgtcctttcaaaacacagtagcctccagttaaacgattcttcgccccttaatgactctcaccaatacaactacgactgcgatgacaagcagaatgtgaatgaagcttcccatcgtatatccgctaactatccccagcaaccacaaaattgcgagtattaatgcaatcgactccagcatgagcaatcccccggtatcaatcgtttctgacgccgcgcgcgccgcgcttagtcaaagcgtcatccggttgaaaacatcattctgtgacagattatgatcgtaacaataaggcgttataacgccttgcaaacagtcataaacaacgtcgaattcgcatggcttttctatatacctgtttgcgcccgctaaaaatgccctcaacctctcatgcatccctgtctttgccgtatgaatgattatcggcatgtatttcgattggtcgttcatttttatcttgcgacagacttcgattccgttcatgtcaggcagcataatatcgagcaaaaccacgttaggttttttttcggtcgcgaaggttacggctgtttcgccgcttcccacatcgaaaaccgcgaaatcatctttcgctaaaaataactctcgcagtttctgtcgataaagcttatcggcgtccgctatcaatattattcttgatgccacggcaaagcctccttttcgcgcttgttttgtttgcgctcaacattaaagggacactgtccgcgcgctttaatgaattaaacagttgagaccttgccgcaatccaagaagttcaaagcgaggccgagcgtcgctttccatgtttcagcgtgagtaacgccgccggcctgctcgtgacatgcccttggagatgacattagattatgcgcgcgtgagccgcttaatcagagcgcgcgcatagccgcgcggaacaacgcgccgtcatttcttcgatttaactaggtctgaaatagcgtcgccggtgtcttccacggctcttttaacgcttttggaaatttctcttccaactttagagacgtctttttttgccgattcaagtttatctttcgtcttgtcgactttgtctgaagccttatccaccgccttgtcaacgcgttccccgattgtctttttgtcgctcataatcttttctccttttgtttttgaatattattctcaggctcaagttaattgcgcctgattgcattcatctatgtcgcagactgaatgagagccgcacattcgtctgttatcctcaatccatcgagggtctggcgaacaacttccaagagcggttctatgtccgacgatttggtcacccatgctttcgcaagatacgccctgaaatctttgcgaaacagcggatatgcggtgttcactatcaccgtcctgccgcctgcgcacaaatcggagagcgcctcaagcccgctcatctccggcatcccgatgtctagaaccactatgtccggctgccattcgcgcgctcgctctatcgccgacgctccgttatccaccacctccactgcgtatccctctgtttcgaattcctcgcggtagagttcggccacgcttgtgttgtcttccgctatcaacaaccttgtcataggcttccccctcagccgcgcaatttcaacttgcgccgcttgtcatcctttgtcattcatgtacttcttggtttttcgttctttcttattgaaatactgtttgaacttgttgatttgtttctttactcccgtcaattcctttggtttctgttctgactgctttttcttggcggccgccgctgaggcgtccttcttctttttatcagaagcggatttggctttagctttgttggcgtctctctgcttctcgatgtccgcccctatcgctttgaagcctttattctgcttgcgcatttccattattttctctgccgggtagttataatgtcctgacataaaccttaaatttactagatttacgatgtcgtcatcggcgagttttatcttgttccaatctttttgcggcttgtttttataatacccgtaggcctttccataaggaggccctgccgccgcgccctctctgagcggcacatgatacgattccgccccgaacccgtatcggtttgatatttgttgccacgtttggccttttagccgatagtctgagacgatcttaggagccacattggctttccgcgaaataaaaaacacaaccggaatatcttcttccgcgatgtttcgttgcctgacattcgcaacttccgtcttcggaacggcaaaatactcgcttatcgaattcataaaactgtcggaggcggcgtccgcggctctgttgaccgcgctccccgctaacgattcgcacatggtctcttttgtcgcgacagtcatcgcgaacaaaaccaatatcagcgccaaaattaatatccttctcatctttacacccctcgttttagaaatattccgttgcatacatcatattgctctcaagcgggttgcgctatcggcaaaaaagcaatctttattagctcatgcggcatatatttgtaactgttttagctaaactcagatgaagctgcgccgcgcaataaatagcgtttgtggctgcgccggaacttatatgctcgccacatttagcgcttcattaagagacagcttatcaaagggagccttaacgcgtttggacatgtttcttatttcaaaggagccattccaagactcagccaacttcttcatgcttaacaaaagcccaacgccggcgctgtcgaggaatgacacttttctcatgttgaacaacaagcgcatgcccggactcatacagcttgtgacaatctctccgaattcatcgcacacatcgtatcccagttctccttcagggcaaaccatgatgtattcatattcattgaatattcgatacgtaaacattgtctcccccttttcttcgcccgcgcgatgcttttctctgactaatgcgcacattcgcttttttcttagaacctatcagagttgaccgcatgttatgagtcgagtcattattgaaggcttttgcgttgcgcggcgcatataaaactccgcgcttttcttatttcggcaatattggcgcattgtttaagctgttggatatctttctttttgcgaaatgcttctttattaatggagcttgcgagccttttgcgtccttgctcataatttgtcgaatttcattgtcaggcatagcaggcaatctatttccagagtctgccttaatttcgaaatacggttgcgcatgttgtcggaatatagatactttcacatcggcgtctgatttgccagcttctaggttatgtgtgttatcgttattcttgctggttttctcgccgctttttgacactttatcaatttcttgttcgacaagctttatgttatctactttttctgtcatgacaatcgtctcctttgagatgcttcgtttatatgctatttgccgataaaaacacgatattcgcgactttgacgtctttattaatcataaacagcaatactttaggcgctatcggcgcgagagcatttactattaactattaagtcttttatttatagctttttcgtctattgcgacatgaataaacatgcaaaacaactttcgcgtcaattcttacgacacaaacgcaatccttcttgttgcggagattgcagatcgcagttgtaagacgacaaataaaaaagccctctataaaagagggttatttgcacatggtcccaaggaggacctattcgccgttttaatttgagcgcctcgtgccgataaagcggatatatgactacagattctttctataactgatgcccacgcttatatcttccacgctcagaatgccgaaatgcaatttggcggattcggacagatcgtatctcatgccgaaattgaagtggtctccgtcatactcttccatgaaagtggtttttttcagggccttcatgaacggcgatttctttgatataaggaatcttgcttcgagtccgtagaacagggagtcgtcgatgtcggaggttctgtatcctacttgatatctcagcgcaattttgtcgatccgatgttttgaacggagctttttaccggaagtaaagttcttgctgaccaccgcgtatttagttctgtttgtggaggcgaggtctaacaatcccgcgcttacagcaggatgctcttgcgcttcaggaacaaaattccatttaaggttcaaagagccttcctgttgaactttttcaacgaatgtcacgcctgcttcaaagcgacgaggtagcccgacgttggctttcacataatccttccatccaaccacgtcaacgctgacgtcgtaatcccacggggcgagcacatacgcgctgggattctttacaagccctgtcggccctgcgatagacggaccgttcggtatcatctcgccgtcaatatatggatcggccatcgtatattcatgcgtttttgaaccgtcttccgcatagcacaatgcggacgccgccagcgttaatgtcgcacaacagaccgcgagaaacatgtaatcttttatcagtcgcatcaactatcccccatgttcgccaatgtttttcatccttaataaatatatagttggggaaatatacgcgctatcggcaaaaaggcattatttcataaccaatgtggcattattttgtagccttttaggctaacgagcggaatgagcaaaattgcgctcaaacaacactttaatatttgctcacatgaaagatagttcggcgtcgcttttttggtgttgcgcgtcgctgctttcgaaaagtatcttcatctcgccgtcggcgctaatcattatcgggatgccgccgtagcggcgcgcggattgggcggctatggtgcgcgctccgagatagcttccgagatcgggatgctgttttatcatagcgcctacggctatcaactcatcgccgtcaaatatcacagccccgtcaagaccggcgatttcaagaaacagatttttcctgctcgtcaaccgcgcgttcatgccgaggcggatatctcgtattaccggggagagcatagcgcgcgccgtgtcgggcgtgggcgcgattcctcctattatcgactgtttattaaccacgtgttcgataactttatggtcaggatcgtacactagcaaagctccgtgacgcatgtaactgaggtcaaacatcagctcgaaaagatttcttccgacgttgatgtcgcccataatgtcgcacacgctgtttttgaacgtttgggcgtcatacacgcgccatcgtcccttcctattcgcggcaagaagtccgcgcgagtccattatgaagatgtctccacgctgtcgcagatgaactgagaattctccgcttttcaggattgaggcgaatggctcaagaaactcgggaataaacttcggctcaaaagactcgctgacatccttccacaagatttcctgatagtctaaaaacctcagttctctgtccacgcgaaaatagacttgcatgctcgacgcaagaggatctacaatcttttgaatcgaagcgtcagacagcgacaacgcgccctctccctccccgatcacgatgttagtcatcacccgattgttctcgtaggttctgaacctgacatcctcgatgtatgcgataaacttgttccagttaacgcccgcgtcgaatatctcaagccatcgcaccgcgatatcctcttcgacctgttgcagtgagcgtggggtcggcacgactggcatccttgctctccagatatcgagattgttctgaatatatgatattagcgatctcaaattcggggttaacggattgtgagagcaaaatacgactgtgtgagcgcccattgtcaattcgaacgcatgattcgcatgctcgcttgaataccagtgcgggaccgtcgagacagcggccttcattatgatgcgttcataagatagcatttttcaatatccaatgttaaatgaatctctgaagaatgcgacctgccggagtttgcgcgataatgtgatgtctaatcattcaagactttgtatatgattgttatatcgcggataaccggcacagcttttttcatgaaaaattccttcaatgtggcttttcgcttaggaacgttgatgacatcgccgggacgcagcgacgggatgtcccccgtcgtccggttcagattccccgcctcgattatctcaggtcgttcagggtagtttcgcgttatcgtcaccccgctgtcggcggcgttcgccgcaaacccgcctgagcgcgttatgatgtctagaatcgtctgcccctcgacataaggataaattccgggagtgttgatatatcccgtcacagttatggactctttcttcgcgggctttacaagcacgacatcgttaggaagaagctcgaatccgtccggaggatttctgactgaaaccgaactcatctcgccttgtcgtatcaatgtcacttccgatgagaatatctgcgcgtcaagggccttcgccgcggctagaagtccgattaagttggctgcgttttccggaatcgggtagaaacccggctccggaacatctcccagcacctacactgaagtcgttccatgatatgaaacataaatggcgtcgccgtctatgagttgaaaagtttccgcgctcggcggcgatatcgagcctcgtttcagcgccaccggcatggacacgccgcttctgacgacgaatactttgcgttcatccattctaggatgcgcgagccgcgcctgcgcgaggagtttgtacatcatatacgggtctgtgagttcgtaaggccccggcgctgtgatttcgccaaggatataaacttgcggcttgtgaaacctcgtcacaagcaacgaaaccttcgggtcttttatgcgcgcggcaatcgtctgttccagttccgcgcgtatttgctccgttgtctttccgagcgcgtacatgtcttctatcagcggaaacgatatcatgccgtcgggcctgccggtcactgtttttaaaaggtcttcattgccgtaaaccgatatctccatctcgtcattcatgtgtatccggtaaacatccatcaccggattctcgccgattgcgccggctcgcgcgagcgtatacgccgccagcacggctgttgccgttaggctagccaacaacataatgcgcgagcgattcattgtcataacctccagaatttctagttgcggactgcggcctgcgcgccgagcggcgccacagtcgcggcgaactatacttgtgatgacaaccctctaaggtctgcgacttgcttgcgaagactgcggttttccgcgcgggcgtccgctctcggtccgagaaatataaaatattcaaccgcgactccgagaataccactgccaataatcagcagaggcagtttcacgctcatagtcgccaccagaagatttatcgtggtgtcggtattgttgacaagcgcgagaatgacgctgattgtcaaaacaaccgtgccgagcatgaaccagatgttttcccagaaacgtctgcgttgcggcgtcgcctcaagcttagcctcggctatggcgttttccgcgtcttgcgcttgctttatgtcgttttttcctgtcatgcgttctccttttttgcggacgcggagcttatccctcaatgtccacaacgactccttcctccgccgcaagcgaattaatgattttattcaggtcttccccggtcacgtccagaaacggaatgtcttctgtttgcttgataacaatcccttttttctcgccgataagctgtatgcgaaatccgctgttctttgcccacactctgacagagaaaggctgtttgcgctcgatcatgctttcattgaacttcgacactgcgtccagcgccgtgttccagagcgctgattttggccgggctggcagcggcaagcctgtattgcgatacagaaaactgtcgccgtcggcggcgattccggttttgcgccccactttttttcccactacgcgcgagaccgggctgacggtcgaagtctgatcgattctatctacgctgtcgattgaatcagagccgagcgtgcgggtgaactgatctcccataggattctccttttttcgaacgtcaagcggccggtctcgatcaaggcccgcggctgctattgtttaagtagaagccccgcagttgtagcttccgtcttttcgccgactgtcacggcttcgttcttagcgcttgctttaggcggccgaaaaacgaaatcgtctctcgaacatgccgccatgtgcatcagggccgcgccttcgctcagtatgattccgccggatttcacggaagcgaagaaaccggctccttcgcctttgcccccggtcgatttaatcggattgattttaatcagttttatctttgcgaacgcgtcttgcgcaagcgtcagttcgggcggtcgccgtctatcctgttcctcgtctaggacgaccctcgtcaacaccgcttccatcgcgtaagatttaagcagattcggaaagatatccgcaaacacgccgtgattgtaaaataaatcaagataccaccatgtgcggtcgatgaaaacaacccagccgacctgcgcctccgtaaactctatgcgcgagacgtactcatcgtgaaggatatccctctccgcgtatagcgcgcagatatcgtagttttcggtctttatagacgaccgctcaaaaaggccttcgatatgcttccataccatattttgatccaccctcgacgcgccttctttgatcatcgtcggaaacgacttctcaaggcgctctcgccggaggctcgccggagcgaaatccgagcggtaaaaagcggggtcggtcgccgttattctcgaagctcccccagagagcgcctcgcattcccagcggctcgcctcgacgctgacagcgggtaaaacaacgctttcacccggtcgaataaccgcgctcgccgtcagcattctgttagccgctcctccgatcaggattgccccgtccagcgccagcgcgggcgtgtcgccgctgttctctatgcttaccgaattcattttgcctgtttccatcgcttttatgccgtcgccgagttctcccgcgcctatgacggtgaaaagctctttcgcctcgaaggcgggcgaaaccaacgtcagagggaatacggcaagtcctccgtattccctcatgtcttgcactttgaggtagtccatgaatattgaaggcgtcggcatgattttctccttcagcccgagtttcgcgttgccgttcagtctttttctgaagcgtctttttttgcggcaaaccgctctttagcattgccgacagcggcggctgttttatcgtgcgcatgcgagaccatgctttttgcttcgccgcaaacgtcgcagaccttgtcagacacatcgtcccattattccctgatggcggcagtagtttctttgccgcttgcaggcgctagaagaagcgccgctccggcccccgctatcgctcccgctccgaagcctatcaaagcgcgccacacattagtcctcttctgcgcgttaatatcgttctgtttggatgttcatttcttttctccctttttgatttctaaagcacatgcctataatgaatatttctatcattattctaaattgttcaaccatagcatcctcctgatatcccgccgcgcagagcatatttgttattgcgcaacaaataccttgccgaaagaaacacgacgacaattcgtcccatgaagatgtatgtcaacacattaatgatacgattgattggaatccgggagtatcggcaaaaaagcaatctttattaactattacggcattcatttatagccattccggctaataaacgccgcgcccctctgagccgtaaatgtggttcgaaaaaaggcgttgatattttcaaatgtcagatcgggcgccactcacaaccttgtgcttgagcatcgttaatattcagggattgttaaaaaacttgacactttattcccggaacggcgaaaagcggggacaggcagccgcaaaagacgcgttgcctgtccccgtttttcgctcgaatactcagccagtgaaaaggcacaatttggagtgcggcgatggttctgggtgccaccctgcatacttgagtgaatggcagcaagttggtatcagtcataagaaacgcgtgatttggaatgcgcgattcatcgcctgtttcctgatgaaagcgacatttcgagcggggcaaccccgcccatacataggaataaatgcggcgccaacgaagcagttcgcctatgtgataaagcgttccgactcgccagttcttcagcgaatccttttattgcaatcgagcgattaatacagacgcgcgcgcgcgcctgatattatgatttttcgattagtcctttattaatggcgaaaaacgtcatgtccgaatcttttttcatgtcaagcttccccatgatgcgatacttgaaggttttcaccgtgctgtaggacacgtcaagttcgtcggcgacttcgctcattgtcattccgcgcgccatcctgatgaatatctgatactctctctttgaaagctgggaaagcaggtcgccttctttgtcatggtcgttttgattcgttacggctccatttgaagccgagaaatagatgtctcccgccgcgatttttcttatggccgcgcatagttccatggctgagattttcttgcacaaatagccggccgctccgctcttaataaaacttattgcaaactcttttctgtcgtatatcgtaagaattagaatttttgtgttcagtttcaactcgacgatctgttttgtggcttccagtccgtcaacaaccggcatttcgtaatccagcacaaccacatcgggtttcagctcgccgcacttctgaacagcctcgcgcccgtccgaggcttctccgacaatctccatgtctttttctccgtcaatcagcctgcacaatccggcgcgcaccactccgtggtcgtccgcaaccaaaactcttatcatctttttagcccctccaacgggcttgtgaaccttaattgtttctaccgccgcgtttgcgggttttgatttcttttttgcttttttgccgggcatatcgcttcctccctctttttcctctcatatcggaccgccaatctctttcttcacattgaaaggaatagccacttttatgtgtgttcctcttccgggcgcggaacatatttcaaaccgcccccccatcatgttcgcccgctccctcattccaaggatgccgaaattgtatctgccctgctcgctgtcttcttcaattccgcaaccgctgtccttcacctgaagaacgatttcagaatcagtttccttcaaagatatcaacgcggttttggagcctgaatggcggacaatattcgccagagcctcttgaagtatcctgtacagattgatggcgttgtcaggactgacgcgagactcgtcgacgggcgttatcctagattctatgaagatatcgctggcgttttccaaatccgcaatcaatgttttcatagcggcgttaaaccccattctatccataatcaaagggcgaagaccgagacatatctgttgaagttcttccgacgcttctatcgtctgcttaatcaaattattgtaaacactcacatccgagcatgcgcattcgcggttcctcagccattcgatctcaagttgcatggagatgattttctgtccgatggagtcgtgaagttcgcgcgccacttgtttgcgctcttcttcctgcgattgaatcattctgcgggatagaaacatcaactcccttttcgcaaggctggcttgcgccttcttgcggtctgttatgtcgctcaaaacagcccgataaacaacgggcgtttgcgcgtcgcgcgtcacggaggtttctacttgcgcccacaacagggaaccgtccgcccgcttcgccattatctcgtacgcctgcggctcttttgtctccagtagtttcttgcggcgaaggtagtgcgcgtcctgatattctttagaaataaacgccgaaaacggttttcccaccagttcgcttctagcgacttgtagcagatttgaaacggcgaggttcgcctgaagaattattcccttttcgctgactgataaatatccgaccggggccatgtcgtaaaggtcgtaatattgcgcctgcgacatctctaattcatcctgcgcgcgacgcagttcctcgttctgcatctcgagttcaatctggtgaacgcgcaactcatggagcagttttcttatttcgtcggtggacattaattccagacgctcatgagcgcgctcagcgtttttatcggcttcgacctcggcttttttgcgaagaacagctaacttctcctcttcgcgtttgttatcgttcataatcatttctccttatgcaattcagccgccgctgcggctatcctccgcgcgcttgcgcaggtcatccgccggggcggccctcttgtcttctctgtcagacattattgtcgataccctgtttcaatcgcttacaattgaattgcatcgtttatgtcagccacttttgaatcatgcttatgtattccatattgctgaaaggtttggccaagtgatccattttcggatccctcgtctctaattccatcatggactgcaaatactcgaagttcccagacacgaaaattatcgggatttcggagtctgtttccctgattctttcgtacacctccattccgttcatatccggcaggacgaaatcaaggctgatggcgtcgaaagaattcatgccgtgtcgctccagagccgttttcgcgtcaacagctagggtcggataatgaccgagtttttcaagaagcaaacatagaattcttcccagttgcggttcgtcttcaacaacaagcacgtttttccctttcgcatctttattttcgctggcaaccgccttcctgtcgccgcgggcagcttctgtgattatcggcagcgttattctgaaaatcgcgcccttgtccgcttcgctttcgcactcgacggttcccccgtgcttgtccatgcaacgcttaacatttgaaaggccgtatccggtgccttttacgtccggcgggtaagctccggtcatatccccgctgcctttcaacgagaacaagggatcaaacatcttgtctttccattcacgaggaatgccgcagccattgtcggcaagttcgattcggatgatgttgttttccgcgcgcgtttttatgcgcaacaccggtttttcggttttgctcatagcttgtgtcgcattattgataaggttgatcaaggcgttttcgagaagcccggcgtccgcaatcacgccatccaaacccgctccgtaatcgacgaccacatcgatattcttcaaattgcctctcagcgtcttgataatcatgtctatcttgtcgttaaggctaaatcggcttagtttaagctgctgatccttggcaaagaacaataagttccttgccagcccgcctcctctgtttgcggtttccagaatggtttcgacatctgatttcacgtccggcggcaagtcttgggtcaggagcaattcgctcgttcccaagatgatggttagaacgttgttgaaatcgtgcgccatccgtcccgcaagctggccgatggccgccattttatcctgttcgagatactttctccttgcgtcttcgtgattcttttgttccgtgatgtcgctgagcgcggctcggcacacctgcgcgccatccgcttcgtgcgccacaatcgcatggattcgcgcccagaagaagtcgcggtttttccccgctattcttatttcgcatacctgcgggtcgcctgtttcaaacaattccttgcggtgtctgtagtaaatatcctgatcttcggagagaatgaatccagtcagcggctttttcaacagcgagcttcgagacatgcccagcagtccggcggcggtgagattcgcctccagaataagccccttctcgctgattgtaacgtagccgacaggagcaaggtcgtacaggtcgaaataccgcgcccgcgacgcttcaagttccgcctgcgcgcggcgcagctcttcgttctgcatctcaagctcaatttgatgcacgcgcagttcgtggagcaggcgttttgtttcaccgggggacaactcgtcaagattaacaggagcgccggatgcggcgttttcaagcgctttattctcggcccgcgcgcgaaggtctgcgtccgcttttccccggctattgtcatcgcacattgtcgcccccgttctttttcggcgatgttttttcttcgccggattcagaccggacacatttcccgcgcgcggttattctgacaaatgtgacaaccacgccctcgataacattttccatggttcggtacggcatgattcgcatggtgtacgaatcgcccttcagggtcttcacttcgcgctcttttgggatcagcgtgttcaacacatctcgcgcgtcggcgaccagcccgtcgtatccctcaaggttcgagacgatatgcccgacgggacgccccacatcgctgggtatcaggttgataatctgggtggcggtcggagtgaatcgcatgattcgcagttggtcgtcaacgaatactgtgccgattcccgtgcctgccagcaggttgttcatgtcgttgttggctctcgaaaggtcgatgactttctgctggagttcggcgttgactgtcgcaagttcctcgttcaccgattgcagttcttctttggacgtctcgagttcttcgtttgttgactgaagctcctcatttatcgactgcatttcttcgttcgaagaccttagctcttcgttggatgtctgaagttgctcggtggtggtctgaagatactcatccttggcgcgcaattctttcctcatcgcctccaagcgcgagccgatgtctgttgcgttgtcgaaagcgccgtctgtgtcggcggcgatttctcgcttttcactgtctgatatccgaggctcttcaatgatgacaatgaaaagctcttgcgctgtttccgcgccagtgggcgccggaatgggttttaccgtcagatttaccgtcgtgaagtcgccgtttgttttgacgcgcaggccgtcatggcgcacggcttcctttgagacggcggttttgtgcaaagccgttgttagttcgcggcccaatccctcgcgggccatcttcaacacattggcgacgcctgcgacgccgggcgaaggttccagaaaatggccggctcgtccatgtatgtacaagatgtcgccgccgctgttgactattatgccggtcattgccgcgtgttgaagcagcgccttctcagccaactctcgaagaggcattttatattcatccgttgtttttcttttttggcgggacgaggcttcttccgtcgccgaactcggaagaaagcggctgagggacgcgcgctgcgcgccttgaatgtcatctttgcgccgatatagttttgctttgtggtccacggaggcaaaaaggctcgcgaaatcgccgattgtctcggatgtgccgagaaaaagaaatccgttcggattcaacgcgtaatggaagaggggaatgagctttttctgaaggtctccgcccatatagattagcaggttgcggcaactgatgaggtcgatttttgaaaagggagggtctttgattacattctgttcggagaaaatcaaaatatcgcgaaggcttttgcgaatccgataggagccgccgccgggttcggcctcaaaaaaacgctccagcctctcaggcgagacgtcggcggcgatgctggccggatataggcctgttctggcagtgtcgatggcgtggccatcaatatctgtggcgaacacctgcaatttgaaattttgtttctgttcctcaagtcgctcctgcagcaacatggcgatggaataagcctcttcgccggttgagcatcccagcgaccagacgcgcagcgcggcgcctgcgggcttgcctgcgaagagaagcggcagagcctgtttctccagcgctttgaacgcctcttggtctcggaaaaaactggtaactccaatcagcaggtctcgaaacagggcgtccacctcgtcctttgaccgctgaagatattttatgtattcctctatcttgtctatctggttgacggccatccggcgctcgatccgccgatggatggtattgggcttatattgggaaaagtcatgtccggtctggttgcgcaacaggattaaaacctttttcagcatatcttccggtttagggagagagcctgcggccgggcgcgttgttttgccgaacgcatgggcggcgtaagcgattagttgcggcggcatttcggcgggcggcagaacataatccaccagaccggttgcgatggcgtttctaggcattccgtcgtattcagtggattccgggttctgcgccataaccatgccgccctcgcccttgatcgcccgcactcccagagcgccgtcgctgcccgtgccggagagcactatgcagatagctcgctcgcgctgatcctgcgcaagagagcggaaaaaaaaatcaatgggaagccgctggcctcgcggcgcggccggctccaacagttcaagcgtgccgccgataaaagccatgtcgcgaccgggagggatgatgtatgcgcagtttggctccaccaccatcccgtctttaacttctaataccttcattcgagtatagcgtttgaccaactcggtgaggatgctcttgtgatccggagcaagatgctgcacgaggacaaaagccatatccgggttggcgttcgcgggcatgcctgaaaaaaaagcctcgaacgccgcaagccctcctgccgacgcgccgattccgacgatggggaaatcctttgggaggtcttgttttccattgtctgcggaaacctcatccacaagcgtcttcttgggcgattcagcgggggccttaacatcggtttttatctttctaggcataaaacagtctcctgactagtcggattggccgatagagccggcaaatcttcggcaaatttcataacggcgagatgctttgttgacgtcgcattttttaagcgagaaccttagcctgatttttcctgtgaaaaatccgagttaagtctcttttgctgcaaattgcgcctcgagattcagccgtagaataaccgcgccttaatcccagaaaaggattcggtttgacagaagtgaatcctgtggcgctttccatgttgcgcaaagatgtggttctcagactcaacgaagaggctcttttctttaattgtaactcacttgaaactaactcgcgcgtgaattggaaaatatacttcgccggaatgtgaaagacgcccgtttaatctgcggaagagattgaaatatgccgctttatttcgtcgcgtaaagcggcgccataatttgccttttgcgagtgggctgggttcttgtcggtggaagcgattgccgggggcatagccgagcaggctagctgaaaaaccataaccagtagtcggaaataacacaaatttgtcgaagttacgcattagattcacggaatacatgcgcttgatgcaggccgagtctgtcgttgagcattttctgtatatgatcgtggagaccgtcaacgagggagcgtacgcgctccgtatcgggctcgacgtcgtggcaatcttcgtaataatgtattggcgtgtcgaagtgcaagtcgaactttgacggaaacggcaaaagtccgagcaagcccagccacggaaatatcggcgttatcggcagatgtttgaaccccatcactttcatgtcgagtttgccaattgtcatagcggattcctccgagccggtgacgcatgccgggatgattggagcgcggtactcaatcgcgtattccatgaatccgggggggaacgcgtccactttgtatttgttgaagatggtgtggaagtcgctctccgcgccggtgggaaacacaacaatgaggttttcgttctcgaagattttcattacgttttcgtcgcagccgactatctggccgcaccggttcaagaggatggagccgccggggatgcctgaaagcgccctgtggattattgttctgatgaatcgtggcttctcaagctccaccagcccggcggtccatatcatcacggcgtcgaatgggagtatcggcgcgtggttggacactatcaggccgactccttcggcggggatgttctgcgcgccgtgcgcgtccacgcgaaagtaattcatgtacatgaacagcgccgccgctcccgctttggatgtgacattcaggctggttccgaactcgtcgtatccgcttgggtcaaactgtatgtccgacatcagtatgcggtttctcatatattcggtcgctgtgccgtcgaagaaatgcttgaatttaagttttctgtagtcgtccattgtgttcacaagtcgatttcccctgattgcgatagtttaatcatcctcatcctagctctgggcgcggcgaagtctgattcgatgcgccgcagcgcctttctttttcctttccgcgcggattttctcaaatccggaggggtcgtatcccagttcctcgaacgcgcgcgcgccgtccactgtgaacggatactttatgtaattgagatcgaatttcagattgttcgaccacatgaacctgcctaaacggcgcgcgagaaattcaggaagcggcgccggcgtctttccgaacgagcggataacctcgcttaacggcaggtgtgcgcgccctctgatgttgtacgcgccgtgagcgttcgggctgcgcagaactcgaatgaaagcgtccagcatttcgtcctcgtaaataatctggaacatggggtcgaacccaagaagcgtgggaacaagtttgcctttcatataagcgcctagaatgctggctcctgaatctcgccagatgggaaccatccgcaggatgatcactctgaggctgtcggagctttccgcgtgcgtttggcaaatcatgtccgcctcgatgcggtctctgatgctgaggatgtctcggttgccaagcagaggacggctttcgagaataaccgccgggttgtcctgccttgcgccgtaaacgatggtggagcttggatatatgaactgcttgaccccgtatttgcgcgcaaggccgatcatgtggaacgtcccgtaaacgttcgtcatcatccgttcatcagtagtcaggctctcgccatggccgagggcgagatgcgccacggcgtctatggttccctcgtttttaaacacatcctcgatgcgcttttttcgcgcgtctccgtaaatgcgctttacacccagccacttctcctgtctgtcgtcgtccacgcagatgtcaacgttgacaatgttaatgtcttcgccccactcctcgcgcatcctcacggccagaagttttcctagatatcccgaaccgcctatcatgagcactttcatccgtcgctcccaatgttaacctgcgttggcgaaaaatgccggttaatagagttcttgtttccgaatatctcgttccgcctgtccccagtcctgaacagataggccctcttgtcggcctcgcagttcgtatagttcataggcgcgctttgcaatctgtgggctcaaatcgaccgcattctcgtctctttctgaaatgtcatgcaaaatcccagagagattctctttttctgtgtcgatcttacccttgcttcttgcaacctttttcgacacattacccgcgcgtttttcgatggttcttttgtcactcatgctttttcgtctcctttaatttcgaaatatcgcaatactccaacacgctcccaaaccaaacatattaaacaaactatgagggctgttgctcttttgagattattcgtattagcttaacaataccccaagccacaacagagtacacaataattgcgactaccgttgacggctcaaaaaccgaagtcgtttctatgccttctgaaagccccctgcggaatatgttttcaaaaggcacaatgaaaaatccggttaatccataaatgaatttcacaaagccgctagaaaggttggctcccatcaacttaagaacgaggcggaaaaccaaaagtatttccaaagcgccaaagaagtaatagactgaatatccgcccgtctgataaccggttgccttcttttcagttggagtcgtcacagcgcttgcgtcgccgatttgtgttgtttcagtctcttttacaacattttccatattcgtatcctccgattattattgatgcgtcggcccgcgttggcgaaaatgcggttagcaatccgattgaatactaaagcacaaagacagacgacgcatgcgtctgaaaaccgctgcatagacaacatgttgcatgcgccgtcgtttttgtgtggcccaaatctaaagcggcctcgccagaatcacttgacagctttcttcacgttctttttaatgtcgtgcgctgtgtcaactacggcttcctttactttatcagcctttttcgacactttattcacagctttgtcaacacgttccccgatgcttttcttgttgctcatagttttccgtctccttttattttggtttatcattatcggttcgtaatattctttccttatgcgctatgacttcctcgcccgggaattagctccatcagcctacgggagaggaacgatgatagtgtttgtgtccaaagtaaccgcgccggtgtcgctcgtcgctccggccaatactctgccgtctattctggagccggaaacacaagtgacgcttacgccggccagtatgtttccagtgaagttagcgccggctccaatagtcgcggatgcggaggcaacccaaaacacgttcccggcctgcgcgctgttggtcaccgaaacatttccagcgtttgcagtcagcgaggagccgatcaagaatacccagacggcattcgggtcgcccccgccgtcgagaacaaggtctgtgcttatgttcattgtgctggcggagctatagacgcccggtggaagtgtcagcgcgcccaaatccgcagttccaacgtctgcgtctggcgtcatacctatagcgaagttatacgcgtccaataagtcttgttttgctagaactgacaccgcatcgttaatgtgcgtcgtgccggtcactgtcggacttccggttattgatgcgcccggactcaatgaaacatttccatctatagtggttgcgccggtgttggtgatggtggcggctgccatgactccgaaagcgcaggtcgaaccaagcggaactgcgcccggagtgagttgcatggcaatcgtaaccgtgtcggtggcgctgtttattattccgtcattaactatcaggtcgaaagcgtatattccagtggaagtcggagtgaatgtaggcgtctgcactgtgccgctcgacaatgcaaccgccgggccgccggactgcgtccactcgtaagtgagggggttgccatccgcatccgcgctggcgcttccgtcgagagcgaccgcggcgggaacgcacggcagaatgagcgtttgatccgcccccgcatcggcgaccggcgctatgttgataagataattcacatgcgtattcgttgcgatgtcgtccgcgttgagcgatgtgtcgcggcaggcaatatagacagttacagcgcccgatgcgagacccgacgttgcgcagctctggctcattgtgccgtcgccgtcgcagtcgtcggccatgtctccgtatgcctgatcggcaagcgaccatttgcaatcagcgttctcattcgtgttgaacgtaatcgtcggcgagtgggttgcaagcgtcgaatctttcgcaggatcccaagcgctctgaacaggcggcgttatatccgcggttgtaaattcccacgtgtaatcagacgccgacgcaaccacggatgcgaactgagcgaccacggcaaacatcgctatgaaaatgagggctttgacggcgccgcagcgcccggccttgcggctgcccctgtgaacggaattgattattcttctaatagaatgtttcataatattcttccatgttttgtgtattgcaaacatttcactttatcaaagacacatagacgatgtttctaaacttctgactccctgttgcccgcatcgggcaatataagaaatcctttagttgccgaccaactcattgccggccacatccttggctccggcggggcctgttttgatcgtggcggtgtaagtggtcaattcatcgagagcgctgtcaggcgtaaaagtcgctgttacatcgacgtacgccacagaacccggaatttccgttactccctgcatcagggtaaatgttgccgtggtgattgtggcgggatccatcgcctcgctgaaggcggcggtgattactttcgtattgattgccacgccggaggcgttgtttaatggaacaacggcagtcacagcgggcgcggcggtgtctgttacaggcggcgggttccattttccggttcctccgcatcccgcaattactataccgatcagaattaaactaaacaaaagataagcacgtcgactcttaaagatattgatgataaacattttcatgaaatctttcataattgtcggcgatacatatcccttcgccttttgttattctctatgcataaattatctgaaatatcagaagccaatgatatcggcggaaaagcattcttgattaactcttatggcttgttgttgtaaccatattggctagcgagagtcgaatgttgtattgattagttgatcctactgtccgatatttgcaacctcaaatatttcaacaggaaacgactttcctttgagttgaaccggcgctaatgcgcgtaacgttatttttccttcaacccgcagcaaagcattctttgtgattaggatttgtccggcgcgcgctattgactctaccctctgtgcggtgttcacgacgtcgcctatgatcgtgtaatccattgtttcttcagttcctatgtttccgacaaccgcctcgccgtagtttatccctatgccgattcccagttttttcaactccggcggccagtcgcgttttaattcttcgaaagctctttgcatttccaaagcggcccgaattgcccatagcgtttcattttcgacaaaaaatgtattttttacgttcctctcgatgtctttggaggaccctatgcagcgggatgtttcaagtaaacgcggaaaagacttcagataatacggtccgaacggaaaaggcggtgcgaaaaaagcgcgataaacaaaaggttgttgacgggcgcggcagggcgtaactgcggataatacgcattatctgaagttcgaacgcaatcataaacatcattatataaaggcatatttgagcatttgcgcggcagcgcgggaggcgttctgcggtgtcgtttcattcaaattgacataaattaattcttgtcaaacgcgcttgaaacggggcgtttccggcatggttttcagtcgttttttaaccccgaaaagggccgcaaaaggggcgtttttcgtttgtttttacaaacgcggttttaacaggttttttaacgtgttttaacgggattcacactggtttcaatagcgtttacaccgttgtgactgtcacggtgtgaaaagactgattcaggcgacagcgatggccgctttggcgttttggagagcgatttgggacatgaattaatttatgtcatacgaaacgactcatgcggaaatgggtcggtcgcgcgctttatgctgacaaatgaggcgcgcaacccgacagttattaatgacccgccttctgacagtaatggtttctgtaaaaacaatcaagctgtctgtgaaataaataagctttataataaagcctataatcgttagcggcttcttctatgcatactcgtgacgaaacgtttcaaaagttttccctttttcttccccgcaagaatctttcgctcatgccgcttccgcgcgcgtgagcggcgcgcctgcgctataatattcaacgcgggcggcgggcagccgcgcctcgcggggagacgccgggattatgaccaaagacaaattgttgttgattgacacgttcggccttatatacaggttctatcacaccatgcccaagatgaagacggcggagggaattcccaccggggcggtgttcggcatggcgcgcgcgctgctgaagatttttaaagataataagcccgactatctggtggtggcgatggagtccgagacacccactttcaggcatgccgaatatgccgcctacaaagctcacagggacagaatgccggacgagttgcgggaacagattccggccatcaacgagcttatctccgctttcggtataactccggccaagctcgacgggtacgaggcggacgatgtgatcggcactctggcgcgggcgggcgcggaacacggccttgaggtcgatattcttacaggcgatagagatatgttccagttggtgaacgacagcgtatcagtgctgatgtcgctgaaaggctcctcagagcttgagaagttcgaccgcgaggcggttaaagaaaaaatgggcgtttatccggaacgcatacccgacctcaaagggcttgaaggcgacagttcggacaacatccccggagtgccgggcgtcggccccaaaacagcggtgtctctgctcgaacaattcggagatatggacgccgtgttcgactctcttgaacagattgacaagaaagggctgcgggaaaaactggcggctaacagggaacttgcggaactgagcagaaggctcggcacgatagagaaacacgcgccgctcccatttgaaatcggcgcgtacaaactcccggcggtcgacaacgaaaagcttgcggcgttcttcgagaaatatgaaatgagaagtttcatatcggagcttggaatgaaagaggaggcggccgccccgccccgccccgccgccgttcagttcgactcggtttataaggctgtcttcgacgaagccgaagtcatcgaagcgcttgagcgcgccgcctcgcgcggcaggctttgcgtagacctcgaaaccgacgggctggacaccttcgccgaccccatagtgggcatcgctctggcttccgaggccggcgacgccatctacatccccattcgacacggctccaccgtgaaacgcggcggcggcgaccttttcggcggcggcgacggctcggacgatgaagacgactccgacccggacgctgaaaaacagatagacccggaccgcgcaatcgctttgttgaaaccgtatctggaaaaccctgacatagaaaaaatcggccacaacctcaaattcgacgcgcagatgcttcgcgcggctggcgtgtctcttgccaacatcgcttacgactcattcatcgccgcttaccttatagacccggacggccgcagatacgggctgaaaacggtcgcggcgaacctgctgggagcgggcctgaaaacatacgaggatatggtcggcaagggaaaatctcagaagaaattctctgaggtcaagataagggacgcggtggattacgcctgcgctgacgtggacgccgcgttgaggatcgagccggagctttcgaggcggctggccgcagacggcctcgaccgcgtgttcaggaaaatcgagatgccccttatcccggtattggccgagatggagtggaacggagtggctctggacgcgtccgcgctcgcggggatgtccgaagacttcgccgcaagagagcgggcgctgagcgcggcggtggcggagcttgccggggcggatgtcaacctgaattccccgaaacaggtggccgagttgctgttcgtaaaactcggcctcagaaaagtcaagaaagaatccaccgacatagccgtcctcgaacagcttaaatgcgaccacccggcggtcccgctgataataaagttccggcaggcgagcaagcttcgcggcacatacatagacgctctgcccgcgctgataaacccgcgcacgggcagagtccacacgagcttcaaccagacgctggccgcgtcaggcagattgtcaagcagcaaccctaacatgcagaacatcccggtgcgctccgaggatgggcgcgagatcaggcgcgcgttcatccccggctccaaaggcctcgcccttgtctccgccgactactcccagatcgagatacggctcctcgccgagatgtccggcgacccttccctgctcgaagcgttccgcaaccgggaagacattcacgcgtccgtcgccgctcaggtgttcggagtccccgtctcggaagtgacgcaggaccagcgcagatacgcgaagacaatcaacttcggcctcatatacgggatgcgcgagttcaggctttcacaggagcttggcatctcccggcagcaggccgccgacttcatagaaacttatttctcgcggttccccggcgttcgcgacttcatagagaaaacaaacgaaaaactcctcgaagacggtttcgcagagacgctgttcggacgccgccgccgcgtgccggaactgaggtcttccaaccggcaggagcgcgaagcgggattgcgcgcggctttcaacacccgcattcaaggctctgcggcggacattatgaaactcgccatgatcgacgttcacaagatgatactcgcgggcgagatggacgctaaaatgctccttcaggttcatgacgaaatcgtgcttgaaacgcctgccgaaaaagtggcggacacggcggagaaaacccgcagagcaatggaagcagcgggccgcgattggggcgctctatccgtcgaacttccggcagacgtcaaagccgggccgaactggctcgacatggaaacggtttatacatgttattagatgattctacccactaccaagtgtgccatgcgcaaaactttttcttttgcgcatgatgcttttcaccaaatagtaaa

SEQ ID NO: 952 - DNA, 108387 bp, Artificial Sequence
  Synthetic Oligonucleotide
tcggcccccaccaagcgcagagccagcctccaaccggcgatgagcagcacctgcgtggcgatgccagccaggaccgcggcaaccagcagccccggggacaggtgccacttcagcccggccatccggggccagacgtcgtacgcggtcttgcccacaaacgcgagcacgatggccacgatcgcgaactggaccgccaggatggcccaccggtaacgtgtcttcttcatgacgggactcgtggcgccggtcggcggcccaaccgcggtgcggaccaaggaaaccgaccccggacggcgaagggactcccagccgacgtcgatcacgcgttcctacgggtggtcctggtggatctcacaattgagcggattgccgcgcccgagcaagtggtcgccctggcggacgagctggctgaggtgcagaaggccgaccaggtctccgccccacactaccgtccggtcaccgccgacgagattcgggcctacgtgggcctggacaaccggttcgccgaccgggccctgctcatcgcccgtcgcgaccaagcggtcgtcggctggtgccacgtcgagccgccgagcgtcgcccgcgccgggggcgatctccatccgtacgtgggcgccgaggtcgtgttccagcccggcctcccccacgcggctcccagccccgagtacgccgaggtcgcgcgcgggctgctctatgcggcctgccaggtgcgcgcccagcaggacgcccgccatgtcgagctgttcgccccggacgggtgctgggctgaacaggtgctgcgcagcgtcggactccagccggctgatcggtggggcacctacgtcgggctgctcgccggcggcccgatcggccaatcccacttgagcgtaagtccgctcaaggagaacgacgtcgcctcgctccccggcatcctggccgaactcgacctgatcagcggcgagttcaccaccgacgacctgaaccgcctggcagctacctttcccggcttcacgccccagggccttcttctggcgcggagatcgggcgccctcgccggctatgtcgtggtgatgatcgacccggcctacgcctccgccaccggccgcgagcgtgcgtggctgggcttcgggcctctcggcatggccgtggtgccgagcggcgagcagaccgagtggctccgcaccctcgcccgggcggccgcgatctccgccttctcgcggggcgccaccgaactggccttcgtcgccagtaccgagggcaagcaaccgacggtctgggggcggctggacttccgggtcgaggtccgttggcggcgctggcgtattgacctctaggtcgtctgttgggccagccaccggcaccacctgaaaacgccgtttgggccgcgcgcaaccatctccgattcgctcgcgagatgggtatactacacatgataggagacgacgcggaagggagatgcggggtgtggctacggcggcgcggacgctaccccggagcaggagacccgccgattgggcggcggtactggctttggccgtctacgcccttgccgtggctgcgctcgtcgcgacccccatcgcacggcaggttgccgcgctcaggggtggtccacccgaatccgtccccctgtttgcgagcctccctgagcgcgcccagcagcttgtcctcgccccgaagcggaatgtcagctccgagcgcagcccccacatccaccgcgactggcgcctcatcggcggcgtcggcgtccacgtggtcaccgtcaaccccgagggcgagaacgtgcagatcgtgatcgggttggcccagggcaccgtgctgagcgagggcgttttcgggcgcgagggcttcggcaacatggtcaggcgcctgcgcccccgcgtagccatcgacggcacgtacttccatctgcggaacagcgagccggtgggatcactggtgatggaaggcgtgatggtctacgatggtctctgtagcagcgccctcgtagtcaccgaggagggcgatgtccacatcgagcaccacggggcgatcatggggcgctatgccggctggccccgcgatgtgcgcacggcgctgtgcagcggaccgacgctggtcagccatggtcaggtacacctgaacccgtatgacgagggcttcggcgacccggcgctcttctcggtcgcccggcgcagtgcggtcggcgtgacaccggaggggaagctgctcctggtcgtcgtggaaacgcccatcacctggaacaagctcgccaacatcatgctgcagctcggggtggtggaggcgatgaacctcgacggcggcggctccaccgccctctactcgaatggcgagttcatcgccacccccactcgcccgctcaccaacctgctgatggtgtacgactaggcgcggttcccccctcacagaagcggccgaatctcgagcccctcgaacgtgacctctgccttgtgcgcgaagaggaagagccgctcacctcgatgctccgggcagcgggcgatgagacaccggcggttatcgaggcagatgtcgatgatgtcgcccctcgtgatcacctcgagggtgaagggtcggtccaggccctcgacgctatggattgagcgtccggggtcagcgaagatggtgctcgcgagcggcggacggatctcggccttccggtcccccggcgagagacgcagctcgtacccctgctcgtagggccctgtgcccctgaggcacagcccgaagtacgacgatcccggagccggcactagccgcgcggtgatccggcagtcgagaggcacgtcggcgagccccccgacctcaaagccactcgcggcctccaggcacacgtcgcgggcgtttccggaggcgcccgccgtcagggcgcggaacggcaggtcgaggggcgctcccgccggcggcgtcatctccgaagggaagtgagtgccaagggagccgtcctcgtgctggatgatctcgcggaacatcgcattgccgccatagagccactggccatcgtccttgctcccctcgagggtcggcaagaaggcaacgcccaggcggcgatccccggtgaaggccgcggtcttcagcacgcgcgccatggggccgtcgaaggtgtctaccggcgggcgtgtccacggcccgagcgggcgtctcgacatgcggtaccgcgccacgccatcattgctgaagacgaggtagtaccacccgtgccactcgaagtagtccgggcactcgggatcgccgaggtagccggggaggatgaagggctcggtcggccgccaggactccaggtcctctgagacgagatgcgcgaggcagcccccgcggccgtggaggacgtactcgctcaaggaggtggtgacgagcaggtggaagaggcgggtgtccgggtctcggaagacgtgagggtcgcggtatgagcgtgtgtactccggtcccggcgaagcgaacgggttgggttcggtcttgcgaaagcggacgccgtcggtgctgacggcgaggctgaggtgctccgaccagtccgagagccgcgtggcgtagtaggcgcggtagaccccgtcgtggaagaacaccgatcccgtgcagatggagcactcgcgatcgtccgtgatggggatggccagggggtggtgctcccagtgggtaaggtccgtcgtgctggcatgtgcccactggtgcgctcccaagccgcccttgctgtggtggtggttctcgtcgaggaggtagaacaggtggaagacaccatcgtggaagaacggcatgcagtcaccgacgtggaggtgcccttcgctcggcttgaagtactgcacgggtgtgggctccttgcatcaggggcgggcagcgacggctgccctgttcactgcggcgggggcatcatcctgccctccaggcctcgcacgtggtcgtgccgagaggcaaccaggagcctgcaacgggctcggcgaaccgaggcatggggacacgataccgggaggatcggggaaggggacgatacctcctgccgccggaaccgctgtgcctcccacgtgtttctcttgctgaagcgcgatctcccgcgtcgaggtgatcggttgatcaggcgcgttgcccttgccgtgctggcagtgcttgccgccgttcccggcccagggggcgccgccgttctccgttgggacttcgaggagaggagcacggactggatggcatcgccggtggacccgaacacgacctcggtggccgtgaccgaggcgcgggccgcccgcggtcggcaagcgctcgaggtggcgggcaagttccccgggtccatcggtgcgacgtactacccctggcaggactggcggccgtatggactcctgcgctttcaggtgttcgtgccccagggcgcgccggacgatctggacgtctacgtctacctcaaggacaagcagtacctctggttccagacagcgcccttccgcgcggcagacaccggcgaccgggtcatcccacttaagcaggaggcctggaacgaggcgacggtggacctctctcccggctcgcaggtgtggcaaccaggggggcacctgaagtcctggaaccgcagcctctactacccccgggagttcggcatccggttcttctccagcaagccgtgggaaggctcacttggcatcgacgacgtccggctcatcgagagcggcggggcggtggcttcggcgagggtccaagaggacgagccctccctgaagcttcgccggaacgccgaccaggtgccctgccacgggaagctcgagctgaccttctacctcgaccgcgaataccccaacccgttcgacccggcggtggttgacgtacaggcgcacttccgcggcccctccgggcagacggcggatgtgcctgggttcttctaccaggattatgcgcggatgcgcgacgggaacgggaacgagaagctgtcgcccgtgggcgagccctgctggaagatccgctactcgccgacggaggtgggtacctgcgagtacttcgtcagcgtcaaggacgatgcgggcgagctgcgctccgcaaccgagaagatcgcggcgacgaaggcgctcgacgcacgggggcgggtgcgagtcagccaggccgacccgaggtacttcgagtttgagaacggggagttctactacccagccggcatcaacatgcgcgacggggggaatcaggcggcggcccagcagggcacgtacgccttcgacgagtacttcccgctcttccaccaggccggcctgagcttcgtgcggacgtggatgtgcgcgtggtgggcggggatcgagtggagtgacaagtacgactcgcggttcgacggcgtggggcggtactcgatgtacaacgcctggcggctcgaccatgcgctggacgtcgcggagcagaacgacctgttcatcgagctgacgctcggctcgcacggacagcttcgccgcgacaagttcgacgccgagtggcagtacaacccttacgccgcgcccaacggcggcccggtcgccgagccggcgctgttcttcctcagccccatcgccaaggacctctaccggcagcggtaccgctacatcgcggcccgttggggctacagccagcacatcatgtcgtgggacctctggaacgagatcgacctgatcgatgcgtatgcgcaggagatggccgacgtagcggcctggcaccgggagatgggcgcctatctgcgggctgtcgaccccggcaagcacctcatcaccactcacttctgcctgcatggagcctggggcggcggccggtcgctctggagcctgccggacatcgactacatccaggccgacgcctactggccgaagaagcacatcgccgacgacctgagccgcgggtacggctcgcgggcggatatccggaagccctacgtctgcatcgagtacgggccccagaccgtgcagattcccaacttcaccgccgagcagatcgaagcctactaccggatcggcctgtgggccagcatcgtgatgccgatggcggcgccggccaagttctggtacaacgacctctggcggcaaggcggctacgcgaagtacgacgaggcggcggcgaggttcgtggcgggtgaggatcggcgcggtcagaagtggcagtggatcaactccgacctcgaaacgaacccgcgtgccccccgtatgtcgcccgccacgttggacgtgcaggtgatgacttctccccaggccacctacttctacgccttcgacctggcgcggatgatggccggggaggccggccggaagctgccgccacaccagaacaccgtcctgtctctcctgcagggggttcccgacggaacatacgacgcggagttctgggatccgtacacggggagtgtgaccggcagatccgaggtcacggtcaccaagggcgccgcgcaggtagcgctgccggcgttcctgcaggacatcgcgggcaagatgaggctgagggcgtagaagcggtttcgtaaccccttctggcatgagcgtcccgctcatgaacgctcgtttcaccggcgaggggagctgcatccatcctcgcagaggcccaggtggcgagcccgggcggtcgtactgcgaagggagggagtgcctgtgtatcttcggcacgtcgtgggacccatggctctcatcgtggtcgcctctgcgtgccttgaggcggctacggcgaactcccacgtcatcctgaccgatctgaccgcggcagatccttactaccgtgccgtcgacgaactcacgcgcttccgacccgcaacccacgttctgcagttccacgagcaggacgtggactcgctgatcgaggcactgcgtcgggagcagccgcggtacgtcaccgtggtggcggcgccaacgagcattgatgcgaacctggcctcgcggatgttccggctgagcacgctgatgaacgacgacgcgctgatggacttcggctacggcttcatcaccggcgctactgcggaggaggccgtcggtttcgtgcgcaacatcgcgcgtgcggagtcggagtgggcgagccttccgcgcaggttcgtgggcgtcgcccagcgggggagtgccatcggtctgcgcggcagcatgagtgggtcgttggtgaaggcgatgcaggcctacggagagtgcttccgtgtcgacggatgggagaccaaggtgttggaatgggagcctggcccgagcggagtaccaatgccggcggatgccatcagcccggcggtgcttgggggaagccgattggtcttcatcgcaggacacggcgggccaacgtgggcggccggcatccgcgctgccgatctggccaacgtcgactgctacccggccgttgtgctttgcggagggtgcgaaacgggcgtcgtgaaccggtggctgtccatgcagcgggacaagacgattggcgagaggttcgtccagccatccgatactctctcccttcgtctcatccggcagggggccgtcgccgtgatggtgggggtgcgatctcacaattgggccgattgcgctcccgtcgtctatcccttctatgctgcgggtcgttcgctcggagacgccatggttccggccaccaaccagtacctccgatcggtgacctccgtgtgggcgccagtgctgaccccgggcaagcccgacgagacgtacgagacgtggaacaccacctacctgcggcgctccaccttcgtcctgtacggtgacccagcctatgttcccttcccgcaggcttcggaacagcatcacggccttcccgaggacttcgaccccttccggtaacggccccggctgcgacaccgaccggggcgagttccccagcgctcagcgcatcccgtccctccgcccacccggtggcgaacgtttccccgtgccacggccaagaggggacacaacggccaatggaggggccaaggtcacacctgacggatcgccagacggtgaaggggggtaggtccacggggaagcccgtgaagcactgactgtcgggctgtggctgcttccctttggccttgcccttgcggggctggccctcctgacggggagccagggccgggcgtggcggatagtgcttggggtcgcgctccttggggcggcggctgctgtcggagcactggcgcacctgcagggcccgcgaccaacctcctgcctccgggaccctcgtaacgagggcggttggccccttcagtcatacggacgcgctgtggtggcaggcacgcgtcgccgtgcatgtctggaggaaccggtgccacaggctatgagaccgcttctagtgccaggcgtagagccctcccggcagaccctcccctttcctctcccgactgcgagggcaggttcctccgccctcctgcgcggagagccgtcacaccggacggacgaggagcgaagagtgctcctgctctgtcacacgacctggactcgcctccagaaacgcctcacccccgtcctccggaggcctggccggtgcgcttgctactgaccttccaggcaagaccctcgcgcaacagcaccactttcccgtccagcaactgactggccggccccgaccccaccttgaccgcgacctccacagtcgcctccctgagacccgccgacaccttcctcactctgtactcgagcttcgccgagcccaggccgggagctgagctcggaggggaccccgaccccaccgcacctaccaccttctcaagctccctggcttcctctcgtacgaccagcgccttgaggcgggcgaagtcgggttggccggtcacagatgcgtccgcgagtaccgccatgaaccgccgagccgcgctcacggcagcggcgcggttccaccagtgccctccggtgccaagcccagccagcgccaggagcacggtgatgatgaccaaccgtccgctgccgcgggcacgcttggccgacctagccagcttggccattgcgcactgcctcctgtcgccggttctgcccgagcacccaacgcaggccgggtgcgacggtcactctgtgcccgggctggcgtccgggtcccgggtgccggtccccatcagccccagaggccacagcatcacccctcggacctcaccctctgcctgttcgcatgtctctgaccgtcacccccggtggcggcttgaattcgaacacgccctccgggagcttctcggggtatccgagccttgtgtgctcgccgaggcgccactcgcccgcgacatcgtagtagcacgagctctcgatgagcctgcccggatgtagtccgaagacgagcaccagcttggtcttgtgcgtcacctcggccgtaagccgattggtgaagtacgacgtcacctgcacgatcggtgccccgtcgcgctctccgggagtcacctctgtgggccggtcggtagggaacacctgcatcttgaggctgaagagccaatcgaaggccaatgcttggtcgggtccattgtcagtctcggtcaccgatgcgccccgtggccccaggtcccataccgttctcccttgtctgacctggacccctccgtcggcccattccctgcgcgatcctaccccgcgcagataccaagcctcacgtcgccgcggatggtcgaagtccagccagttggcctggcgtcgcgacagccggaccttctcctccgtgacctcgtggatcggcgtaccctccgccgccttgagcgcctcatccagtatccctcgtaccgacccgatgcgggcgtccaccacagtcgcttccgccggcggctcgaactcgaacagcgcaggatccaccgtgacaccatactcgaagtcggtccggtcttcggggacagggctgccgtccccggcggtccgtgacctctccatcctcgcaacgcgctctgtgtccgcgtctatccagagtgtcgccgaccacccttcatggctccttatgtcgatgcgtttggctgccttgccctccagcgacgcgtccgaagtctggtactcatccccgggccgcacttcggccagccagtgggttccggacaactccgccaaagcccgcctcatcacgtcgggctccgggtcgtagatcataaccttgttgctgtggcggtcccaatcccaggtcgcctccaatgtgccgatacggagccgatccggcaactcgatccggtagccatggtccacggaaagccaggcttccgtcttctcgccgtgcgaggtgcctactgcatgcgctgtcctgacctccgccatcgccttcagggtgtcggcgaaagcgctggtgttgcccacgggacctcgcaggacggcgacacagacgatacccacgagaaggaccgcgccagctaccaggagcctgaggcgcgtcgctctggccatccctgagccgagggcccaggctcgactcctcctctgcgccgcttggatccgctcctgcaccgcagttgacaggatgtgcccatagctttcgcccgggtcaggcacatccagacctcgcagcaccgccgaaacccgcgccagctgtgcatactgcgaccgacaggctgcacagggctggaggtgagcgaccaatccgtcccgcccctcaccgggcagctgtctgtccgaccataggttcatcatccgccgagcggctctgcagtccaacctcaacacctcccgaagcatctgcggtacccgcaaggaggtcgagaaggcggcggcggagggtctctcgagcccgatgcaggtggcgcttgaccgagccggtcgagcatcccatcgcgcgtgccgtctcgtccacactcagcccttccagctcaaacagcacgacggcggcttgctggcgtctggggaggcgccggatctcctcctgaacgcgcgaggagaccgcgatcctctcggccagctcctcctcacctgcgccgcctgtctctaccggtacgagcaacgccgcccgccgcgcgcgctgctctcgctggcggtgagcaaggcagacgttcacggctatccggtacaaccatgggccaaagtccgagccctgtcggaaaccccgcaggtactcgaaggcccggatgaaggtctcctgagcaatgtcatgggcgtcatccccattccagcagaagcgatacgcgaggcggtagactcgcttcccgtgcatctcagcaaggctgccgaaggcctggatatcaccggcccccgcgcgtgcgaccagtgcggtctcgtctccttgcaccgtccgctcgcctcctccggttcgtcctgcgcgtctacactgtactatctactcgcgccccggttcggttgacctgtccggcacaatagaaggcgttgccgcccgccacgtcaaggcgacagacagccctctgccgctagcgtcttgtcaaaccctcccctctcgcgtatcatagcgcccacctgccggcctggcctggccggcaagtgctgtctcacggggggaggcggcgtcgaccgtgccccaagtgtacctcgttgatgtgacaaaccgcgacggggaccagaccgcccgcatcggcctggccaagctgcagaagacggtcatcaacctgctgctggccgagatgggggtgtaccagtctgagttcggcttccccttcagcttccacgaggtgccgtacctcaacgcgaacctggcgctgcaggagcgcggcgtcatgcggggcatcatcctggagggatggtgccgcgccatcatcgccgatgtggcgactgcgctggagcacaccaaggtccgtcacttcaacctcagcatctcgacctctgaccagatgctccagcggaagttccagggccgcttcagccgcgatcagcttctgcgcacgatggccgacgcggtggacgccgccaggcagggcggcgcgctcaccgtggcggtgaacgcagaggacgcctcgcggacgtccgtcgagttcctgatcgagttcgcggggagggccaaggagcacggggccgatcgggtccggtactgcgacacgctcggcgccgatgatccctttagcatctacgaccgcatcaaccgcctcgccaaggggggcgggcttccggtggaggcgcactgccacaacgacctgggaatggcggtggcgacctcgctggccggggcgctcggaagcctcgacgcgggttacgacgcgtacatcaacaccaccgtgaacgggatcggcgagcgagcgggcaacgccgacctggtcgcgtgcatcctggccctgcgccacgcgccggcggcgaggggacgcgaggtgctcagctcgcggatggacctgacgaaggcgtggcggctggcgaactacgtggccgactccttcggcattccgatcccactgaaccaggtcggcgtgggcgcgaacgcgttcgcgcacgaatcgggcatccacgccgacggagccctcaaggaccgacgcaactacgagctgtacgacctggaggagctgggccgggggaagcccgagaccgtggagaccggccgcgtgatcctgaccggcacgcacagcggcgtggcaggcctggcgcacgtactgaagacgcgccttggcattgaggacccgccgacggagcgggtgcgcgagacgctgcacctcgtccagctcgccagcctctcgacccagaagcctctcaccgatgaggagctccgtctggtctgggagcaccctgacatcgcataccagctggtgacggtgcccaccccgcctcagaagccccgttcccgggcgtagaaggcgatcgtggcctcccgaacctcctcgaagtgtcgcgcccgcccctcggcgagctgcgtcatgaacgtgatgcacgcctcgagtgaaggcccgcggtcgccgctcgccgactgagcagcccggacctctcgcagcacgccggtccgcgcgtcctgctcgaagacgagctcatgcccgccacggccgtcggcggcccagatgctgctcacgcgcctcaccgtgcggccatatcctcccccgatggccatgaacagaagaaggccgacccggccgaacgcttcctcggtcacgcccaaggtgggtgagagaagaatgttgcgcacttgcaccgggtcgtcggcgtgcagacacgcggcaaggcgtccgccgttctcggtcagctcgaagaagcgggcgaccgtctgcccccacaggtagccgtaccacatgccggagccgatctcgtggcagagggaacaacgcgcgcgtcggtccgagtcagacagcgcctcgcggaccgcgcccgcgtccggggtggtgacgatccgctcgccgggcggcaacatgcccaggagatcagccagcaacgtcgtcttcccggccccgccgggcaccgcgccggtcacgaacgaggccccgtgcgcgatgtgccagaggacgtagccggcggcctcaggcctgatcgtgtccgcggccatcaggtcaacgatgctgagcgtgcggccgccccgctggttgagcatctcgatctgctcgacgttgtgccgctcgagggcggcgtcgcctggggtcatgctgtctgctcgcgctgcccggtaggggtactcgggcgggcgtattcgctgcaggtctcggcgcgcccttggcgccccacgtgaagaggcggcgcagggcgagagggggaacaggcaggggagcagtcgaactccacggccggcgggagcagcatgcagtgatcatcgacttccacgcccatctctgggcgcgtgacgacgccgaagaggccatggcggacatcgccgcgcggtacggcgtggaccgcatctgcgtgagtgcgatcaacagctacgtgccggacgaggaggaggtcagggcgctgaatgagcgcacgctgcgggcgatgcggaagtggccgggcctctacgtcggcttcgtgtacgtcaacccgaagcacggcaaggcggcgcttcggacgatcgatgaggccgtggctgtgggcatggcgggagtcaagctctggacctcctgctacgcggacgatccgtccgtcttcccgatcgccgagaaggccatcgagcttggcctcccggtcctgcagcacgcctggcgcaagtggacggggaacctgccgacggaatccgacccgcggcacgtggcgcggctcgccgagtgctgccccgacctgaaggtctgcatggcgcacatcgggggcgattgggagtacggcatcaaggccatacggcactgcccgaacgtgtgtgtcgacacgagcgggtccctcgcacacacggggatgctcgagatggcgatcaacgaactcggctccgagcgggtcgtctggggcacggacatgcccggggcggacttcctctacacctacgcgaaggtcgccaacgcgccgcttccccctcgcaccaaggagaggatcctctcagctaacgcccagcggctgttggggtgggcgaggtggccggctacctcagcgggctccagcgaggttgctccgcgtcggggaagcccaggtgcacgagcgcccgcccaaccagcgcatccaccagcgactcgatgtcggccggccggtggtagaacggcgggcaagcgggcaggataaccgccccggcctcggcgagggtcgtcaggttgcgaaggtggatgaggttgagcggcgtctcgcgagggacgagaacgagcgggcggcgctccttcaagctgacggcggcggcgcgggtgatgagcgtatccgccgtgccggcggccatgcgccccagggcacccatgctgcaggggatgaccagcatcgcggcggcgcaggatgacccgctggccggcggcgcagtgaggtcgtcgaaggcgtaccaggtgacgtgcgcctccgggcccgcgagctcgagatgtgtgacccctagctcgtggcgaacgatctccgcccccgtcggtgacacggtcgcccagacctccgctccgtgccgggcgagcgcgcgtagcgcgcgctgggcgtagatggcccccgatgctccggtgatcgcgacgaacaccctcatggtcgtgtcgcccccagaacccacgcgaagccgagcggctgacgacgcgcggtgatgcccacaaagccaacctcgcgtaggagcgcggccatctcatcgacgctcaggtactctacgatggagttggcgaggtaccggtacgcctcgacccggtgcggggcgacgaaccgtgtcgccaacggcaccaggtgccgcagcgcgaagcgcttcagaggggcgaggaggccctggggccgcatgaactcgaggatagcgagtcgcccgccgctcctcaacacgcggcgcgcttccagcagccccgcgcgggtgtcctccaggttgcggatgccgaagccgatggtcaccccggcacaggattggtcagggagcggcagggcgagggcgtcagcgcaggccgaaagcggaactgcaccattccccggtgtctggacatgggactgtaccactttgcgcctcacgagccgcagcatctcctccgcgaggtcgaccagcagcacccgacagcccgggtgccggacggccagttccagcgcgagatctccggtgccgccgcagaggtcgaggaggagatcgccgggcttcgagctgatctcgcgagcggcggcctcgcgccaacgttgatcgcagccgatgctcaggacgcggttgaggaggtcgtaggtcggcgagacctcgttgaagagccccttgatctccgctgcgctctttcccgtcatcccagacccagctcgccccacactcggtcgatacgctgcttcacgtcctcactcatcgtgatctcatcgggccacggccggcggaagccctcctcgggccacttccgggtggcatcgatccccatcttggtgccgacgttgggttgcggcgaggcgtggttcagcacgtcgaccgggccctcgacgaaggtgacgtcacgctgagggtcgatgtggttcagcgccttccacacaacctcctgggtgtcctggacgttcacctcggcatcgcagaccacgatgaccttggtgaacatcatctggcccatcccccagagaccgtgcatgaccttctgcgcgtggccggggaaccgcttgcggatggagacgagggcgaggttgtggaagaccccctcgatgggcaggttgatatcgacgatctccgggaacgtgagcttgagcagcggcaggaagagccgctcagtcgccttggccaggtagcagtcttccatcggcggccggccgacgatcgtcgccgggtagatcgggtcgcggcggcgggtgaggcaggtcaggcggaagacggggtaatcgtcggggagcgagtagtagccggtgtgatcgccaaaaggcccctccctccgcagctcgttgggatcgacatatccctccagcgcaatctcggcctccgccggcacctccaggggcacagtcctgcacggcaccagctccaccgcgcgcttccgcaggaagccggcgaagagcatctcgtcgaagtcctccggcagcggcgcggtcgcggcataggtgagggccggatcgccgccgagcgcgaccgcaacgggcatgcgcgtgccgagctcccggtggcggcggaagtgccgcgcgccgaccttgtggatgtgccagtgcatgccggtcgtagtggcgtcgtagacctgcatgcggtacatgccgacgttgcggatgccggtgtcggggcatctggtgaagaccatggggagcgtgatgaaccgcccgccgtcacccggccaacacttcaggatggggagctcctccaggccgaagccctcggtctgcacgacctcctggcacggacccgagggcaccatcttcggcaggtacgcggacatcccgagcagcttgacccccgtacggaccttctcgccgaggctcgtcggcggctgctgggtgacgagcgccgtgatctccgccgcgatctcctcgatgtcctccacaccgagcgccatcgccatccgccggggggtgccgaaggcattggtcagaacggggaggttgaaaccgacgacattcccgaagagaagcgcgggcccgaggcgtttgcagacgcggtcggtgacctccgtgatctcgaggtcacggcttaccggagccgcgatgcggcgaagctcgccggcttgctcgagggcctggatgaacgcccggaggtcgcggtaggccatgctggactgctccccggagagacgagtcgccgcatctacaggcagacggcgacggcccgaatccaggacgaatccatgtgcgctacgcggaggggcagccccatgaagaagacccgctgctgctggagggtctcgaggttcaccagcccctcgatgatcgggatatccctccgcagcagctcctcatgggtgtcggcccgcacggtcgcccccgcctcgtaggcccgcgggtcgtcggggctcacattctggacccccagcatcttgatcggcttctccgccaggcaccaggcgccctggagggagatcgaaggcggcgggccacccgcggggctccacaggagggcaatgtcgcccgccctcacctcgtcgaggtcggacggcccgatcgtgtacccgtggtcaaagcgcagcaccacggcctctcccaggaacgtctcgaggggcatctcggcgcacgacttcccctcgtcgaagaggtgcgcgggcacctcgatgtgagtcccgatatgggtctcggtgtcgagccagtgcatgagggtgtgatcggtgcctgtcctgaactggcgcagctcgcatcgccggacctcgctgccccagaggtactccccgtccaccttcaggacacccgggcacacttcggctgacagatcgacgattcggcctctcgcggggaactccattgtctggctcctctcctcacttcccggacttggccccggtggtcgcgccggcgaaggagtaggtgaacgtcctggggttctgcgtctcctggagctccgcgccggcggctctggtgagcacctccgccgagaccagcgggatgccgtggtagagcacgggcggcacgttgagctgcagctcccggttgccccacaggacgcgcgtgctgtcgagccgcagccgaagctgggtccccggggagatgacgtcgatggcctgcgcctcgcggtcccaggtccacttcacgcccagcgcctcgagcaccttgcccaccggcagaagcgccttccccttcaggaccaggatgggcgagagccccgtgagctcctgtccggccacgatgacgtggatcggttcccgcggcaggtgggcgcgccactcctcccgtccgctgaggaggatgacgcctccgtcgtcgctggggatcgcctcgatcagctcggagagggtcaccagctcatacccttgcgcgatcaggtcgggcacggcacgggagatggcggccagcgtctggctgcggtcgccgccgccgtcatggcagagcacgatcgcgcccggctccgcgccgctcatgatccgctggtagatcgtctcggcccccggctttcgccagtcctccgtatcgacggaccaaagggcgatgtggtagccggcgtcgaggatggccttgcgctgggccgaggtcgtcgcgccgtagggcggacggaaccaccggcagcgcttccccgccgtcgcgctgatgatggcctcggcacggtcgatgttggctaggacctcggccacgctcctccgggtgagcagtgggtgcccccaggagtgattgccgatctcgttcccgccggcgacctcctgccgcacgatgtcctcctcatggccgatgcaatcgccgaggaggaagaaggtcgcgtgtgcgccgttctgggcgagaaccgagagatagcgcatcgtcgtctcgccattggggccgtcatcgaaggtgagggccatgcgcttcggaagggatgcccgggcttcgcgcgacccgccaaggggcgtggcctgcactcggtcggtcaccacccgcaggccgctcagcttgccgatgtcccagcgggtgaggccggcaattccggcggcggaggcgacgtagacgggccgccagtcgtgcgcccactcggccccccgcggcgggtcggtgagcaccgcctcctcacgcacaggttcgcgcttgtccgcgccccgctggagagtcaggtggcggtagccgtaggctccggcgccgccggccacaggctggcccgcgcacaggggcgtgggcggctcgccgccgccgggctggatcacgccgccgcgcacgtcgagcagatcgccgcgggggagccggacccccgaccgcgcgatcgcccgctcgacgctcgtccaccgcccgacccacactccgcgcccttccacctcgacacgcgcgggccagatgtaccaggcgagcgcgaggaccaacggcgccgccgcaacgacgatccgtcgcgtgcgtagccggccctggcggcgctcctgccgctctcgggccgcctgctcgcggctctcgcgcctcccggccagctcatcgaccaccgacgcgggaagctccagaacggcctcgccttgcgtaacgtccgtagatgtggtcgtatcgccgttcgccatgggttcagcggggctgcccgcgaaagagacgccgaccggcccggaggtatcaacgtcgtaacgtgccgaagtggtttcagacgcaacagccgtggtctgcggttgaaaccgctcctacgaaatgctatagtagctgcgtggcagtgcggaggttgggttccgctcgccgggggggcgtacctctcccgcgcagcggcttccgctgtcccctctgggaggctcaccctcatgcagaaccgcctcagacgcgcgctgccggttgccctggccgcggtcctggcagccggaacgggcgccgcgcgcgccgcggaccaggacatgctcaagctcatcgtcggcgagttgcctctgccccccatcacgttccagctgggcatctcgatggcggtaggccagacggctctggtcgggctcggcgacccgatcgctgcgctgaaggcggccgatgggcggatcgcccagaaccccaacgacgccgaccctcacctccgccggggcatggcgctggaggtcctggaccggccgggacgcgaggaggagtacgcccgggcggcctacctgtaccagcaagcgatggatgcgcgggcggatgacgtggacgcgcggatcgggtgggcgcgggccaaggcgcagctcaacgcctgggacgaggtccggcccgcgatcagggctctggcgacggagcacccggagctctggtggccgcacatggcgctggcgatcgacacgatggccagttgggatgcgaagtcggcgcccgccgaacccgaggccctcagcaacgcgctggcccaggtcatggacaacgccctcgcggaggtcggcgaggccctgcgggcctcaccggacgaaccagcaccgcgctggctggcggcgatgctccactggctgcgggaggtgccgaggtcaagcggcccgggcggcgcggcgagcccgggagtgctggcccgggtcgacccggaactgagggaggcggccaaggcttgccccggggagccgatgctgcaggtgttcgcccggtgggccacggccacgcgggccatgatggaagccggaggcgagggcgacatgccggggatgtggcagcggatgcgcgcgcaggatcagcggatgctgacggaggacgagctcgccacggcggcgatggtgcgaaccgaggcaggacgaatcccgccggcctacgagctgctggcggtgtacgcggtactgcacggcgacgacgggggcgccaaggcgtggctgaagcagagcgtggactatgacccggcctccgccgagcgctggctggcctacgtggccaacctggccaggctgggcgaggtcggcgagatgggcagcgccgtccaggaggccctggcgaaggtgaacaacgggaagctccggtgcaccgccgccaagctgtgcgcgctgcgggccgactgggccgaggccgagaaggccgcccaggcggcggttgccgtgggcgatgagtcgctgccgttggctcagctcctgctcggggtcgtgcggctgaaggccgggaacgccgcgggcgcggtcgagccgctctcggcggccgcccctcgctggagcgagaacggcctcgccgaggcctccctggcgctggcgttggccctgaccgggaagcaagccgaagcggcggaacacatcgcccaggcgcgtaggctcaccccggacgagcgcctctacgagcgcgccgcgcaggcgatcgggggatgaggacggacttcggacctcggacctcggacctgacggcgaacggccgttgcgacgactccacaaaccagagacctcagactcccggccgttgccgtcggtctgaggtctgaggtccgaagtccgccgtcgccgttacatctggtacgtcacatacgcgcggtcggtgtagaggtcccagtcgacccggatgccgaagaactggcagaccgagcggatgggcacgtaggtgcggttgcggacggtgaaggccggctgctgcatctgccggggctgaccgttcacgtagaccgtcgtgctgccggggatgatctggacagtgatcttgttccgctcgagcaggatgagatcacccggcgggccccactcgatcgtgccgccgatgtgccgcaggaggtcgttggcggtgatcaggacgtggttgcctcgcagtgtgccgtgcctctcaaggtcgccctcccgcccattgaaccacacgatctcccgcaggatcttcttgtggtagagcttcacgaagttgggctgagcggccttggcctggcctgtctgcgacacgacggcctggttggcgatctcgagggcgatgtcgcctgtgctcgccacccgccgcgtgccgtcgaggcactcgacccgaaccgtgtgcttgccctcggggagggtggtcgtgtccaagtcgagtcgcggcatggggtcgttcgtggagtacgcgctctccccgtccacgacgaacgtcacgtagttccccggaagggtgtcggcgcgcagggcgagggtgatcttcccgcggaccacgagcgggccctcggccacccggatgcgctcgccaccgctcaccgcgagccgcaggtcgccgcttccgcggaggatcgtctcgctggccccagcgatggccgcgaggatcagtgcgcacgacaggccggtcacaagcacggtcagaacgcgtcgtacgtgcatcaatcatcgccccttgccggccccccgagggccggatcggatttcacgcacgatagcacacagccggaaaggctgtcaacggcattgtaccacagacacacgaacggcataggtaacgcgtgtgcgctagctatgggtggttggtattcggcggccgcctgcgcggcaccttctcgcccggcctcgctgttgtccgggccgcaccgacgggggtctgccgtcaactctccggcccctcaagaggccgggggtatcgtcgcgaccagcaggcagtccaccatcgcctcggggctacagccgttgagccccgcgccccacaccgggttggcctcgatcaccgcccacccgcgacccctgatcaagccgacatccagcgcacaggtgatgggaagcgcgttcgcggagacgaaggcttgcgcgaaatcccgggccacgtcggggctcgccgagccttcatagaccgcgactgagactacacccctgcgcaagacgaggcagcgggcctcggcggcaaaggtcactggctccgctgtgatgatcgcggtgatcggttcgagcccgcgcgtctcagccgccagtgcagcgtggtcggggtacactgcggcgcggaagagcttgggtgtcgcgggcttgacgaacagcgggtaggacaggtgagccgcctcggcgaggcgggctgctcggagaccgcgcttcagccagcaggcgtcgacacggccgagcaggtcgtccgggggcgacacgagccccaaccggagcttctgggccagcgtgaggcagaacagctcgttcccgtacacgcgaacctggcgtcgatcgagggcgggcggctgccagaagcggtccagccgctgcaccggccagccccgcccaacccacgccgcggcaacagcgtcgcgctctgagtcctcgcgggcagggatgagcaggatcggttgctcagaaggcattgtcgcacctaccggcccggtcctttcaccacgaccccccctcggcggcctgtcgtctcgccgcgccgcacgaccacctggccgttgaccagtacgcagtcgaggcccacggggtagacgtgcggccgaccgtagtcgccgcgctcggcgattgccgccgggtcgaacacgacgatgtcggcccggaagccctcccgcagcaggccgcgatcgggcaggcgcaggcgcgaggcagggaggctggtgcacttgcggatggcctcgggcagcgggaggagcccctcgtcccgaacgtagtgcccgaggaaccgcgggtaggtcccgtaacagcgagggtgtggggcgccggaggagagagggccatagggggcataggcgagcccgtcggtgccgaggcagcccaacgggtgccggaggaactcgcgcacatcctcctcgctcatcgcccataggacgcagctcacgtcgccctcctcctcgatgagcaggtcgagtgttgcgtcgagagggtcctggtcgcgctcgcgggcgatctcatcgaggcgcttgcccacgcaccaccagttggcctcggtccgggccgaggtgaccatcgtgttggggaagcccagcgagaacccgcctgcggcgctctcgcctcgagcccactggtcgagcgaggctcggagccgggcccgcgtctcggcctgcttcagccgctcgaccatggcgcccactccaccgtcgagcacccaatcggggagcgatccatacaggtggcggctgccggcggtgtaggggtagacatcataggcgacatccgccccgccctccgccgcgcgctcgagtctcgccagcacctcgcctgcgcgcccccaatgctcgcggccaacgcacttgaggtgggcgatctggagacggcaccccgtgcatgaggcgatgccgagcacttcgtcgagcgcggccatcagccccgggccctcgctgcgcatatggaccgtcaccagggcctcgtgctcggcgcagacggctgccagagcagcgggctcctccgggccggagaaggaaccaagggggtaggccaggcccagggaaacacccacggcgcctcgcgccagggaatcggcgaggagagtgcacatcccgccgatctcccccgccgtcgccggccggttctcgaaccccatgacccacgcgcggagcgagctctggccaacgagggtcgcgacgttgtacgcggggcgcgccctcgccaggaggtcgaggtactcgtcgatctgctcccactgccacttgaccggggcgtcgatgaaggtgcagacgcttcgcatcgcctcccggtcgcgcgcgcggacggggaaaggcgccaggccgcactgcccgttcagctcggtggtgacgccctggtgcagcttgctctcaccgagggggttgacgaggagggtgagctcagagtgcgcgtggggatcgacgaagcccggcgcgaccacccggccggagcactcgactcgctcgcgcgtcttgacctgccccaggctcccgatcgccgtgatgcggccgtcctgcaccgctacgtcgacgcggcgagccggtccacccgatccgtcaacgacttcgccgcccaccaggagagcatcgatcatctgcgtggccgcgccgttcctcgtgtctttgtgtcttcgtggtgagcgccgtctgccccttcggccacggtcacaagcgcccctgcaggggccgggattgcgggccggaatgtcgccccacaacccgtgttgacaggccccgcgaagtttgtatatagtgggcggcacgccggagggcggtcggtggcctggggccatgatcgccgcgaggaggcgccagtgtcatgcccgttggtccggaccgcgacatcctgaggctgattcaggggcggcctcggctactcgaggggccgatgggcacgatgctggcccggcgagggctcgcggccaagaacagcggcgagcggaacctgacgcatcccgaggccgtggcggagacgcaccgggagtacctggccgccggcgccgaggtcttccagagcaacagcttcgccgcgaaccggcacatgctggagcgcgcggggctgggcgagcacacgagggacatccaggccgcggcggtgcgcattctgcgcgaggccgtcgggccgggctacccaatcgcggcgaatctcgggccgacaggcgccgtcctcgaaccgtatggcgactgcccgcgcgacgaggcggtcgccgtgtttcgcgagcaggtcgagaaccagttgcccgaggggccggacttccttctgttcgagaccttcgaggacctgcgcgagctggaggcggcgatcgagggcgcccggcaggccggggccaccgtccccgtcttcgcctgcgtatccttctcatcgccgaacgggcgcacgagcttcggcgtggacggtgcccgggcggtcgaaaagctgattgcgctgggcgccgacgtggtcggggcaaactgcgggcatctcgagggcatccgcatcggcatccgcgagatgctgcgagtcgctgaccgtccggtgatggtcgagccgaacgcagggctcccggtcctggtggccggcgagacgcggtttgcgggcacgccgcaggagtctgccgacttcgcccgagagatgctcgacctcggggtgcgcctgatcggcggctgctgcggcaacacgccagaacatatgcgcgccacgagagcagtgatgagcgcggagtgatgagtggagggcacggcgccgacgcgacgtccactcatcacgcatcatccaccattcatcactcagcatgtaaggaggcggacgttcatgtatccggaggatcttcggtaccacgaaggccacgcctgggtgcgccaggagggcgacgaggtaaccatcgggatcacccagtacgccgccgatgagatgggcgagatcatcttcgccgagctgcccgacgagggcattgaggtcgagcgagatgaggtcttcggcaacgtggaatcggcgaaggcggtggaagacctcctggcgccagtgagcggaacggttctgcgtcggaatgaggccgtgctcgatgcgcccgagacgatcaacgaggatccgtacggcgagggctggctgatcgtcgtccgcatggaggacgagagcagctcggacaacctcctcacggccgcggagtaccgggcgcacatcgacgaggccgaggaggccgaggaggaggccgagggggaggccgaggaggaggctgaggaggaggaactcccggcctttgatgaggaggagggcggcgacctgggctagatgtcggacacgtctgccactacgtggcgtctcctgaggagtgagccgtgccgcggcgcgcggaacatggccatcgacgaggccatcttgcgcgcgcgcgctgacggcgcagtaccccccacgcttcgcctctacacctggcgcccccctgccgtctctctgggccgattccaggagctcgacgagcgcatcgacctcgaggccattcgcgcgcgaggttacgacctcgttcggcggcccaccggtggccgcgcgatcctgcaccgcgacgagatcacctacagtgtggtcgtccgggagacggacatccgcaacggtcacgtcttgatgacatcctatcaggagatctcccgcggcatcgaggccggcctggccctgttgggcgtgcaggccatcatgggcggccaaggcgggaagaaggcggaccgacgcgagtccttgccgaccatctgcttcgccaaggccgcccggtgcgacctcgtcgcagaaggtcggaaggtcgtgggtagcgctcagacgcgatcgcggggcaccatcctccagcacgggtcgatccccctgacgatcgacctcgatgacctcctcgccgtcttgcccggtgtccgtggtgaggacatcagcagccgctgggagaagctccggcgggctgcgtgcggtgtggtggaggtggtggggcggccggtgacccccgacgaggtcgccgcggccatctgcctgggcttccaggccaccctcggcgtggagcttgtggcgcggaacctgacaccccaagaggaagcgtgggccgaggagctcgtggcggccaagtacggcgccgccgagtggaccgagagggcaccgccacgtcggggctgacgcgcgcgggccaccgggccggtccgtcgatgggagggggtgtgcgcatgaggcgccgcttcttcggtcgtcgcgtggaggtcacctgcgagaaggacgcagggggcttcgctctcccggcccgcttcgacttcggcgaccgctgcatcgaggtggccgaggtcgtcgcccagtggcatgaccatgggttccaccccgctgcgcggcgacgctcctggcttgagcgacgccatcggacgtactaccgggtccgcggagatgacggctgcctctacgatctctatgtcgatcgcaccggtgggcgacgggactggtttgtgacggagcgatgggacgggccgatgtgaccttcgcgccgcggtggtcatgaggctcactcgaccacctcgttgttctccctcgaagagcgcgtcgttcgcagcctaccagggcgtcatcaggcatgagcgaagaccagcccgaaccgcgacccctgtctccggtcgagctcaatggccgtcagccgtaccgggtcgatctcactcagggcagccttgttcggggcatcctgctcctcacctggccgatcatggtcggggcgctgctgcagacgaccgtgcagctagccgacctgttcatggtgggtcggctgtcggtcggcgccaccacggcggtcgcggccgtggggatgagcggcacgatcatcttcgtcgtgatggtcgtgatgatggccgcctccaccggcgcgcaggtgctggtcagccgtgcgttcggggccggcgacctgcccctcgccgagcgcgtcagcgggcaggccttctggatcatggggctgaccacttgcgcggcgctgtcgccgctggggtacttcctggcccgcccgctgctccacgcgacgggcgcggcgccggaggtcgccgcggtcggcgagccgttcctgaagctgctcttcgtggccgcgccggcgatgatgacgaacttcgtctttggcgcggtcatgcagggggccggtgacagccgcaccccgctcatcgtgaacgtgttcatcaacctcctcaacgtcttcctgaactggaccttcatcttcggtcacctcgggctccccagactgggcgtcaccggctctgccttgggcacgctctgcgcgcgctcgatcgccgccctcgcggcgctcgtcatcctctcgtccgggcgctttgccctgaccgtacactggcggaaccacctccgacccgacttcggcctctgggcgcgcatcctgcggatcggcgtgccgtctgggctccagggcctcgtccgagccgtatccaactggattctgctgcgaatcctgaccagccttcccgcagcgacgccgatcatctctggcagcgctatcgccgggcagattctgatgatcaccgggttcatcggcttctcggcgatctcggcggggatgaccgtcgtcgggcagaacatgggcgccgggcggcctgatcgcgccaccgcgggaggttgggcggtcgtgcgactcgcggtgtgggccgaggtgctgccagtctgcctgtatgtgctgctcgcgccgcacttggtgggcatcgtggggcgggatgtgactgccgaggcggtggcctacggcaccctcgccctccggatcctggccctcggcgagccgggctgggcagtcaacatggcgctctccggagcgctgcgggccggcggcgacaccatgtcgccgctgcggtacacggtgtactaccagctcctcgtggggatgggcgcgggtgcgctcctcgtgctcaagttcgggtacgggccggtcgccgtgtggggatcggtgctcctggcccagatgctgcaggcgaccgcgacgatgtggaagttccgtcgcggcgactggatgtcgatgtacgtctagccgggcaggagggggggccctcggaagggaaatcatccggggcgaggcggtacctgctctgaccaggcgttgaggccggagggttgggctatggcgaagccgggcgagcacatcctgacggtcgttaccggggacatggcgggctacacgttcgcgctcgatcgggagtcgatggcgatcgggcggaacgcggcgaacgacatctgcctgccgatggacccgctcatctcacgctggcacgcgcagattcgtctgctgccggagggtgtcgtcctggaggaccggaacagcggcaacggcacctgggtcgggcagacgcgcatctacgcgcccgctgtgctccccgtcagggcgcagttccggctggggcggacatggctgcagctcgaccgcgtgcccgtcgaggcgccgtacatgcccgacgtgagcgaccaggtcgtgctggtcgacgagcagaaggccgacgaggaggccgaggcgattgtgtactccgtcggcccgggcggcccgaccgaggccgagagcatcgacgagctgcgccgtcgtctgcgcgccttcgagcaggttggcctggctctgggcgcgagcctggacctccagaccgtcctcaacacgctggtcgacagcgtcatgcaggtggtgaaggccgagcgcgcgttcctgctgctcatcgacccggagacggggcaggcgacccctcgggttgcacgacagcccgagacgggtgaccacgcggccatccagatcagccgccacatcgttgacaaggcccgctccgagcggatcgcggtcctcaccagtgacgccatgcacgaccagcggttccaggatgtggagagtgtcgtgggtctccagatacggtcggcgatgtgcgtgccgatctaccgcgccgaccgcgacctgggcgtcctgtacctggacacgaccagccgctcgacggtgttctccgaggacgacctcgagatggtgaccgggctggcgagccaggcggcggtggccatcgagagcgcccgcctctacaccgacctccgccaggcgtacgacgacctacgggccgcgcaggagcagcttctccgcactgagcggctcacgaccatcggggcgctctccgccagcctcgcccacgacatgggtaatgtggtcacgccgctggtgccgctggtgaggctccttctgcggaccagttcccccgatgcggagttggcggagtctaccgagcggcagctggcgcgactgacggcgctgatccgccggctgctctccttctccacaccaacccgcgtgcagcaggaacgcgtgcaggtggacgaggtcctggacgagacgctgagattcctgcagacggaggccaaccaccgaggggtcaccatcagccgcgagttcgcgcccgacctgccggctgtggtaggtgatgccagcgagctcgaccgcgtcttcctcaacctcgccctcaacgccatccaggccgcgcctgagaagcaggggcgggtcacggtgcgcaccgaggaggacgagggcgaggtggccatcagtttcgtggacaacggtcccggcatccccagcgacgtgttgccccacctgttcgagcccctgttcaccaccaaggagggcggcaccgggctcgggctcttctcctgcaagcgtatcgtcgaggacgagcacgggggcaccatcgaggtcgactcgcggctcaacgagggcaccacgatcaccctgcgactccccgtgatcgccaagcccagtgctccagggacgacgcccgatgccgaagcctgagggcggggcccagctatcgcgtcgcgactggatccgtgctgccatcggcccgctggcgctggcggtcgtcggcgctctccagggcgtccgggtcaccggccccatcacggtagcattggcgcacccgaagcccgccgtcacgctggtggtcgcggacgtgctcgccgcgctggcgctcggagcgttcgcgctcttcgcagccagtgccctggtaggctcccgcccccctctcagccacctcgccgccccggtcgccgccagccagcttcccatggccctggtcgccctcctcgtcggtcggaccaccctcggacacacgatcacgcagaccgtcggcgagcacggcgacaagctgctgaagaagcccgggatgcttgcccagcccctgatcctccccgcgatcttcgcgctcctcctgaccgccctggctgtggccctcatgttcttcggctaccgtcgcgcgacacaggctcagggctggcgcctgtacctgagcttcgcgggagggctcatcctggccgagctgctgtgtcgggtgtggttccggttcgcgggggggtagaagggcaggagtcaggagccaggagtcagaatgcagcagaacggcagaggcggagggcccttgccgctcttcgggcttctggctcccgacctctctggagggacccccttgatccagacacgacgccgactcatgttggcgctcgccgtcaccagccttgccttcgtaggcgccgctgcctgcggtgacgagggccccaacctcgtgcccaacccgggctttgaggaggcggtgggcggttggaagccctggggtgccaaggccgacgagatcgccatggacgaggccgtcgcccactctgggaaggccgccgcacggctgcccggcgccgatgccgcgctctacacctacgtcgccctcggcggagggagggcgtaccgcgtgagcggcttctgtcggttctcggccgggtgccagggcgccatggtaagcctcagcctctgcgcgaaggacaagggcaacggcagcgcggggacccgacaggtgatggtcgaggccgggccgcccggcgaatggcgggggttcggtgaggtcatcgtcacgacgagggagaccgtccagagccaggtggccctcagcgggcaaggcggcgcggtgtggttcgacgacctgtcgcttcgcgagacgaagctgcccgagtgggccgacccgaccgcgggcgcgtgggatggcatcacgaggacgcgcaccgacaagccgctcttcaaggagctcctcggaacggcgccgggcaagtaccaggtgacgatgtgggggcacgcgctgctacgctcggcgctgccggagtccgaccgcaagaccatgagcgacgccgactgggagagggaactccgcagcaccttcgaccagatggggacgaatcacctgaacgccttcctgctgccgtgggggatcgccggcggctccgagccggaggacttctggcgaacggacgagttcatccgcgcggttcacacgaggtacgggctgaggttcgatgccgccgccgagtcgagcggcgtgatcgcgcgggcggtgaaactgggggcggaggtgctgaaccccaaggcggtcgaggagggggccagcccgcgggtctcgcccgtggacccggcctacgtgcaggcctgcctcgacgagatccggtctctgggcgaactcctcggtgacaagccctacgtgcgggcgatcgtggggcaggatgagccgaccgtgccggtgttccccggcctccgctcgaccgccgggccggtgatgcgcggcttcgacgccgaggtgagcgcgaagttcggcctcggcaagttcggcatgcctgccccagccgaccccgagtggcgcgcgcgggacgaggagcaccccctctgcgggatcgccttcaaccgctggatggccgggcgctacgcccaggccgcgcaggcgaagtacgaggccgtgaagcgcatcaaccccgactggtggtacgtgccctgcgacttctggctgatgggcggtgtgatgcccttcgactactcgcacatggccaagtacgcggacatgctgcagggcgacccgtatgcctcgagcgccgagcgcacccgcgggcgcggcgtttacaaccacgggttcggcgccaagcttctcgccgacctcgggcgcggcagcaagcgcaccgagccgaagccggtcgagatcatcgtgcaggccttcgactacgcgggctacaagatgacgcccgacgacctgctggagtggtgcagccaggcgctgcggtgcggcgcgacgtcgctgaacttctacgcgtccgatgcgccgcggttcagcgacccgccgctctgggagatgatgctgcacatcgcgaagaccgtctccgaaatgccggcgctcaagctgcccacccaaaccagaaccgcgatcctctactgcagcgccgcgcacgcggccgaaggcccgtacgcctcgggggacgaggtctacaccgcgtatgccctcctcggggagaagctgggctgctggttcgacatcgtggatgaccggcagctccaccgcgcactgagaaagctctccgactaccgcatcatctacctgcccctcgcccggtacgccgacccggagctcgcggacgagctggaggagtgggtgaaggccggtggcgtgctcatctgcggcgatcccgatgccttctcccgggcccccgacggcgccgacaccagcgccacccgggagcgcatcttcggggtgaggacgaccggcccgaaggacgcctggttcgtgctgatgggtgacaagcgcctcccgctcttccctcgtcgcaccgagaacgccacagagccgaccgcgcgcgcgatcgaggtcacagtcgagagggcggaggttgtcgccaggtaccccgacggcagtccggcgatcgtgcggcgggagctcggtcagggccagaccatctacttcgccgcgaatccgttcaccccggagtcgctcttccaggacgcgccctgggccgggttcctcggcagcctgcagaaggaggtgagggagacgatggacctgcccatctggcacctccgactgccggagccggaacggcaggggtcaggagccagaatgacggcaacggcatcgctgaccagcaacacgcgccgcttgacgtgcccgtcgctcagcgggtagaatggtgtcagcgcacgagggcgctgccagtccgcgggaagggccgtgcccacctctaccagcctccgaccaccccaatcttctttcagcctgagaagcggacgacaggcggcgttgaaaggagatagccatgccttcgtcgcttcacccctatgccggccgcctcacgaacctgcgcaagcaagccaaggacctgttgaggtccctcaggcagggcgacgcggacgcaaccgcgcgcttcgccgctcaccatccgaagggcccaagcgcggaggcccgactcgccgatgcccagctggtggtcgcccgggagcagggcttcccaagctggccgaagctccgggcggctctcgacccgaagaccttgggggacgagcttgagcgtctgcgcgcgcagctcgtcgcagacggcaagcaggagtacctccccctgctcacagaggggaacgtcaagcgcgccatacacaagggcatcgtgtcctacgaggcccatgtggaacacgggccagaggcgcaagcgtacatcgaccaggtcatcaagccctgcttcgccgacatcatcgcgcgggggacgtggcctccggacgcagtgctcgacgcctactacacccaacgggacgaccagggcgtgacgtacgagggcatcggcgtgagcctggagatccgcacgcccgggcaagcctacccggggttctcccacgcgatcctcgacctgtggtacgggcggttctgaccggcgacccctcgcctgcaggccgttgcgggcgagggcgcccgcgctcccggagggcgtcagcgaccggccgccgccgtcattgcctgttcctggttccctgccgtctcggcgggtccacgacctctcggatcgccggccagatcgctccgtgcacctcatggtgctcctggcacttcgagtcgaggaagcggcggctgccctgccttccagccgggtctctctatgcggagcgggggatcgccgaccaggccgttcagcttcaggatgtggctctcatcgtaagtgtgcatcacggaggcgggggcaagcaaggccgaggccacgtgcacggcgtctttccccttcagcccgaagcgtcgcgtgatgtcccgggacttcagagcaacgaagcggtcgacttgcaccaccacgatgtacggattatcgaagaactccacaatcatccgttcctgctcgtcaggtagcggaagaccctcgagcttcgccacctcgcacagcgcgaaggccgacgtcgcgatcctcaactccccctgctccgcgcggtcagtgatgtgcctcaggatgtcgatcttgtcgggcgtgccctcgagcctgtggatgaacacgtcgctgtcccagtagacgagtccgtcatccggcatcgcgcagcctccgcacgtactccgtcgggtcgacgccatcggttatgttgatgccctctagatcccccgcctgcggcagttcgctctggtccttgaggggccgaatctgctgcaccttgatgctcacaggcctgtcagcgccggagtagcgcacattgccaaacacggcgaccctgtggtcgaaggcgtcgtgcgcttcccccagcttctcgggcgggatcacgcactcgatccgttgtcctctcaggtcgtcccagatggcgaagtagggcctgccgtgcttggacagcgtttctagccgcccggtgaagctgccgagctcctcgtgcgccttcggcaggagctggtccacattggctgccacatgttgcgaaggggagacctggtcgccccacggggcgatcaggctgatcctctcaacgtcgttattgagagtggcgacgaggctcttggcacccctcagggatccctctcggaagtagcgcggagcctgaccgccacccgcgtccagcgcgcggagcccatcaatgcacgcgaggatcacctgaggcgcaatgctgggctccgaagcggccccagcctcaatcgtcagactcagagggctgcccatgctggcgtcgacgatgcgccagtcaagcgtgacgcctgcctgacccgagatgctcgcgtcaacatcctgcaggatgccgagcgcgtcacgaaccaccgacaggaaggacgcgacggctacggggccgtctctgccggccaccacgatggtcaggcggtcctcgctcatggcaatggctccctccggtaccgcctctctcgggtcgcgcgcgcgacccgggcggcccggcttgtccgcgccgtttggaggcccgacgcgttggggcggcgccagtccgtcatcctggattcgactccaggtcgccaacctcctgccgcgtcctccgcatcacttccctgatcgccggccagattcccctatacacctcgtagtgctcctggtacttcgagtggttcggctcttgcgggtcgaaggaggagcgctcctggacgagggcagcgcaggcctcgtcgagggatgactagcggcctttggcgaccgcgctgaggatggcggccacgaggcaaccggtctcggcgatgtcgggcgtggcgatccgcctggaactgccgccgttgcctcagtccagcgggatcatgcgacgctgctgacgagcctcgttgaccacctcgagggccggctcgtcggcgtccagcaactgctcattggcgttgaggagctcgatgccgtagaccgtgccatccgggccgatatccacgtttagggactcgctgatatggagggtctcgacgtcggcagccttctctcgtagtcgcaggtaggcgatgttgtaacgcgggtcgtacgttagcttcatgggcagcctccccctctcagaagtaccgcacaatgacggtgatcaccaaccagccagcctcttcgacggcgtaggtctcgatctgtttcgtaccatactcgcggtcgcgccaccgaccgccgaagacgaagttgcgccgaaagcccacgcgcccgagcttggcggggaactgctcaccgccttcgaccgtggcgatgacttcctctaccgtcgcgccgcgttcctccgcccgctcacgagcgtgcgggtgtaggcgcacgttcattgcccgcgtgctccctctcagctccagcagcccggacggccgtcatgagagccggtgcatcactccgctaatcgccggccagatctccctgtagacctcgtagtgctcctggtacttcgtgtggttcggctcttgcgggtcgaaggaggagcgctcctggacgagggcagcgcaggcctcgtcgatggaggcgtagtaccccttcgcgaccgcgccgaggatggcccccgcgaggcagccggtctcggtcacattgagggtcacgatgcgcttcccggtcacgtcggccttgacctgtagccacacagggctcttcgagccgcccccggtggcgcggaggcagtcgatgcccacgccggcccgcgcgagcgacgtgacgttcaggttcagctcgtagcacatcccctccaggatcgccttggtgattgtcttccggtcgcagctcagggtcagcccgaggagggcgcccttggcgagcggatcgaggtagggcgttccggtgccgacgaagtaggggatgaggtaggtgccggtcgggccgtcgggcaggccctccaggagcacctcgtacacatcgcgccccgtgcgagcggcctcggccgcctcgaccgcgccgaactggtcgcggaaccagcggagcacgctgccggcggagtaggtgaaggcgatggcggcgtacatgtcgcgcttcacatgcggatagcagcagtagttgtactccagcatctccggggtgagcaccggctcgtcgaaggccacgctgatgcactcggtcgtgcccatgccgtcgaccgccaggccctggcgcacgatgcccgccccaagggcgttcatctgctggtcatggcccccggcaaggacgagcaccccgagcggcaggccgaggtcggtggccgcggaggcggggatctcccccacgacctctcccgactgaatcggctccgcgaacatgccgggcgagatgccggcgtgactcagcatcacgtccgaccaccgcttgttcacgatgtcgaaggccatcgtgcgcccggcgagggtgtagtccagacgcggcgcaatccccagcttcagcatcacgatgtccggccagaggaggtacttccaggtgcgctcgtggacctccgggcggtgccgcttgagccacatgatcttgttgagcgtgaagctggagtggagcggcatgccggtgatgcggaagacctcctcggtgcccagggtctcccgccagctctccgcttcggcgaccgagcggttgtccatcgaggtgatggtgttggcgacgaagccgccgtccttcgtgcacgccgtaaaggcctcgccgatggcggagacgcagagggtctcaatcgggtcggcggccgtggcggcggcgacctcgcggacgacctcctgcaccgcgttccatacgagcggcggctcgagctcgatcatgttcgggcccgggtagatttcctgatactcgcggtaggcggaggcgagctgtcggccgtcgggggtaaaggcgacggccttggtgcccgcgctgccgatgtcgatcccgagcaggctcattcggcgggctccttccccgcgtcgtccttcttctggaacgctgcgtcccaggcatccagcagcttggccgcctcgtcgcgcttaccccggatcttggcgacgtcggagaggttcacgtagagcttcgtcacgccgtccaggtccagtgcccggatgtcgatctcgagccagccgtcatcgctggccacgcctcggtgcgtcggacaatagcggatgaagcgcgcgggaatctccatcggtcatcacctcacgggcctcaggccttcgacgccctcaccagcaacgtcggcaggggcgagtaccggagcagccggtcggcgatgctgccgtagacccatcggcccagccccgagcggccatgggtgcacatgacaatcaggtcgcaggggtcctcggcggcttgggcgatgatctcctccgccacgtcgccctggcggacggtcacgctcgtcggcacaccatcctcgctcagccgcccggccaggccctggaggtactcctgagcctcgagcgtgcgcgggtcgaactggtcgtccggctcaccctctgacaggtcgtcgtgcggcgtgtggacgacagtcagcaggtggagctcggcctggaagcagcgggcgagggcctcggcatggggcagggcctgctcggcgagttccgacgtgtcgagcggcacgagtatgtgcgagtacacggtcaacacctccaccttctgcgttcgccgccgaggccttcgccggtcagcgagctgcctcctgcctggcctgagaggaacaccggggcgacagagagaacccgtgcgcatgccaggagggcgccccatgaaccgcgtgtcccgcgatcacaccttcacggaattctccccggacctggcgccggtgtgcgaggtggatgagggtgagtgggtcctggtcgagacctgggactgcttcggcggcgagatggcgccggggaagcgacgcgaggacatcacgccagggctggccaacccgacgaccggtcccatcgccctccgcaaggcgcaaccgggggatgtcgtgcgtgtcacgatcgcgtccatcgagccggccgagcggggcttcgtcagctcggagggccagtaccggttcatcgggctcgccaacggctttgccctgttcagcgaggaggtgaggctccccatccggcccatgatcggcgtgatcggcgtggcgccggcggaagcaccggtgaagacgaccttccccggcacgcacggcgggaacatggacacggtcgacgtgaagcccggggcgcagctgttcctgcgggctcaggtcgcgggcgcgctcgtcggcctgggcgacgtgcacgcttgccagggcgatggcgaggtcgccggccaggggcttgagattccggcggaggtgctgctgcggcttgacatcgagcggcagcctctcccgacgccgaatccatacatcgtggtggatggtcgcctgacgctcatcgcctccgccccgaccttcgaagagtgcatcggggaggcgctcggcgagatggtagacgtggttgctgaccggatgcggatgagcgcggctgaggcgcggatgctgatcagtctcgtcggcgacgtgcgcatctcgcagatcgtgaacccgctggtgaccgcgcgggcggtcatgccgatcctgtggtagccgtgttgtccgctgacgacaagggaggacgacatgaggccgcaccgatacctgactgcctgctctcttctcgcggccttcgccctccccgggacctccgcccaggatcaagccgtctggcgcttcggcttcgagagcaccgagggcctcaccaccggctggggccagagcactgggaacattgccctctcgctcaaccaggacccagcccatgtcagcgagggccaggcgtcggtgaggctgtcgggcaggacgggagatggccgcaacaaccgctacctcgccatcgaggtgcccgtgcccgaggtcgacctgaccggccggatgctcaccttcagcgcgtggacctcgctccccgaggccacgagagccctgtatgtgagggcatacgataaggacggccagtgcgtggtgagttggctgagctggagcggcattctcgggacgaacctgacgcactcctttgggctccaaccggggatcagcatgaacggtctcgggtgggagccgagcatggtgacggccgaagggcgcccggtgaccaggctcgagttcatcatcggcaccggccaggacaatgccgagtacgacctcttcctggacgacctcgccatcgtccccgagcggttccggaggttcgacgaggtgaagacgccgaagcccctctacccgctgacgaagctcgcggaagacggcagacctctggcgttggtcgtccgtcccgaggaccccgcctacgacgccgcggtgcagaagctcgtcgacggtgtgcgcgctgcctcgggcgcgacgctcgaagtgcgcaccgacgccgcagcgcggcaggacctccgggccgccatcgccgagatgtcggcgagcaacgtgatcctcctcggcaacgtccacaacaaccgcgcaatcctcccgctctactcgcacatgcggtgcttcgccgacggcgtcttccccggggagggcgggtacgagctgcgcaccgtgcacgatccgtgggctacggggaagaacgtgctggtgatcggcgccacggacgcagcgggagcggcggcgggtgtggaggcgctcatcggcaccttcgtcccgcatcccgagctggtcgtgcccccgatggtgaaggtgcaccttggccccgaagcgacggcccgctggggctacaccttccagcaggagctgggcgaagcctacctcaagcagatgcgcgaccggtccgaggagctgttgcagtcgggctcccacacggggctcggcagccacgcggcaggcatcggcgagcagtatgccctcaccggtcgcgacgactacgcgaaggccttcgtcgccgtcatgcgccggtggaaggagttccacgactcagagcccgacacgttcggcggcccgtggggcatggacgcggacttcaccctctaccggctcgtgcccgcgtgggacgcgatcgaggagtcgcccgcggtgacagacgatgaccggctcgcggtcgcgaagatcctcttcgagttcacctccggggagtgcgtcaaccacgccatcgaggtgctggggaacgaccacgtccgccacaaccacgccacccacgcggcactcggtctgctcttcgcgggggagtacttctccaggtactacaactccgccgaggcgcagcagtggctcgagatcgcggacgcgtgcttccaggtacaggccaaggcgtggaagccccacgaggactgcaacggctaccaatggctgacgctcgaccacctggtccggtatgcgctggcaaggcccgacctcacctacttcgagaacggaaacgcgcgaaagggcgccgactacgcgatcctgggcatggacaaccttggctaccaggtgacctacggcgacacgggcgccttcaccggctggtggtccgagcttccggtgctgcaggcagcggcctggttctacggcgacccgggctaccagtgggccatcgccaagaagatcggcgtgccggggcgagtggccctgggcgagtacgcgaagaccggcgagggcgagccgcccacgaggttgctcggcgtgcaggccttccccgtcgatcccgagtactaccgcagcctgggcggggagaaggcgcctccacttgagaagacggtcgacaaggtcgtcatgcggagcgggttcgacccggaggaccagtatctgctcttcgatggactgagcaacggcggtcatcggcactacgatgggcagtcgatctcgcgctggacggaggatgggcgcatctggctcgctgacgccgactacatcaagtccctgccgaagtaccacaacggagtgctgatcatccgcgacggccagtcgcagaccatccccgactggtgtgagctggagcgggccggcgagttgccgcacgcgggcttctcgaagaccaagctgtcggactacgccggcgccgactggcaccggagcatcatctggctgaagggcacagccttcgtggtcgccgacgagatggtggcgcgcgagaaggcctcattcagcttccggcccatctggcagacgatcggcacggtgaagcccgcgcccaatggagtgctcgtgacgcaggccgggcggcacgcggccatcatctctccgccgaccgggcgggcgctgctctcggatgaccgcgcccagggagcgaactggtccggctaccagtacgccgacgaaccggtcgtgcgcgtcttgcagcaagtttacgacgccgacctggaggccggccagaagcgaacgctcttcaccgtgctgcgggccaccggggagaaggagccgagcgtcgcggcctcctcgccgggagagggctccatctacgccgacctcgatggcattcgggtgctcatcggcgtgggctcgcccgaatccgaagccacgctgttcggggcgtcgatccgcgcggatgcgttcatcgccacgccggagttcctcgccgccttcggcctccgttcgctcagctacgctggacagacggccagcgcaaccgaaccggtggacatcgagatcgacctgaccacccaccgggcgaccatccgcgccgagcgcccgaccctgatgaccgtccccgagcttggcgagacacccgtgcccgccggcgagacgcagatcgacttgcctgccgaggcgaacgtggtgcaggactatgtgtggctcatgctgcagcaggcagctcaggcgccgcaggccgggcagccgggatcgccggtgcccgagggcctgccggctctgaggaagctgttcagctaccgggagaagctgccggcgtacctgctgaccggaaaccgcggcgccttcgaggcggtcgacacgaagctcgagaccacctgcgatccgcagcccttggcccgcaacgtgttcagcccgaacgagcaggagcacaacgacctcgcgggcctgacggatgggcagctcctcactactgacggcggggtgatgtgggacaaggggcagacggtaacgctgcgcgtgaagctcgatcagccatacgacatctccgccgtgaacgtgaaggcatggtacgcgacctcgtcgagcaagcgcatggtgtaccaggtccgctcggtccgcgtcgaggggtcgaacgacgggttcgcgaacgatgtccgggtgctgggcgaggtgacggacaccgagtcgcacgggaactggggtgatcccacctatgggccgcacacctatgctcccaaagggctgaaggggcaggtcagggagctgcggctgaccattgcgccgcgcgtgggcgatcaggtcgagctgccccagccgcccgatcaccccggcgcgcccgagccccccatcgccgcaggcatctacctcgctgagctcgaggtgtggggcaaccgggaggggttggaggccgacccgaaggctgcgctggcgagcggcgtgcccgtgcaccagttccaggcagtggccgtggcggacgtcgatgccgacggcgctgaggagatcatcgccggcagcagcaacggaagtgtcaccctcctcggccgggacggcacgcagcgctggtccgtcgacaccgggggcgcggtcaacgcggtggcggcagcgcacatcatcgaccaggggctggcggtgatcgccggctccatgggtggacgcgtgacggccctccgtcccgacggtaccgagctgtggcacttcgacgtgccctactacaagcgcccgccccacgtgcgtgtcgttctcggcgcgcacttcggcgacgggaagccggcggtggtcgtcggcgcggacagctggcggtactacgcccttgccgccgacggccgggaactgtggcactacgagagcgtccacgggagcaccgcaggcgcagcgggcgacgtcgatggcgacggtgtggatgaggtcgcctgtggaacggagtactactggtggcacctcgtaggcgccgacggcaaggcgcgctggcagtactccacccacaccggcccgaccgccaatgccgtggccgtcggtgatctcaacggcgacggcaagcgcgaggtgctcttcggcggagccgacgccaacgtccatgccatcagcagcgacggcaagctgctctgggagttcaacaccggcgacgaggtcaccgcggtcacctgcgcggatgtcgatggcgatggcgccgaggaagccctcgtcggctcgctgtccttcaacgtgtacgcgctgaagggggatggccggtgcctgtggcgacgagacctggggacgccggtcgtcgacctgtgcatggtcgggaagggcgccgagggccgcgtgtgcgcggcgtcgcgcgagggccgcgtctgcgtgctcaacgctcgaaccggtgagtgggcagcgatgtacgatctgggcgcagcgcctctccgcgtcgccgggggagatggcgaaccgaggctcgtcgccacagcgaccgatgggaacctgtacggactgacgtggtagttcgcgttggtggccgttgccgtgctcctgggaccgcgagcatccttgctcgcctgttgttgacgtcaacgccctgcgagcaaggatccttgctcgcatcctctcgacgtcaatggcgtgcgagcaaggatgctcgcggtcccagttggcagcgtcgtgcgcaaccagcctatgctctcgcggaggaccatcatgctagcccttcagttgatcctggcggcgaccgtgtcgccggcggcggaggtcgacctcgccggcgcccacatcctggttggcgagaaggccaccgacacggaggtcttcgcggcgcgggagctgtcgcggtacttcaggctcatctgcggcagacgatcgcccgtcttgtcctcggcagacgccggtccggccgtcgtggttggtgtttcacgtgaaacacgatccccggaggccgatggcgaccagacctacatcctacgcgtggtcagcacggccccaccgcggatgctggtcagcgggtacactcctattggagtgcaatatgcgacgtactcgctcctggagaagctcggtgtggggttctacctcggtggcgatgctttgcccgagcggtgcgagaagctcctgatccccggcgacctcaacgagacccgagcacccgtcttccgggtccgcggcagtctgccctggtacaacttcctgaactcgccgaccacgtgggacctcgaggattaccaggttttcttcgaccagatggcgaagatgaaggacaacttcgtcggcttccactcctacgacagtgagccattctgcgcgtacccctaccagggacagtggcgcatgggcgcacccgcggccacctcgatgacgtacgggtggggcccgctgcggcacctgaagacggacgacttcggcttcggcacggggcggtacttcccgtacgaggtgttcgggtcgcggtcggtcgctctggcgaccgaaccggcgcagccctctccggagggcgccgtcttcccccatcgcaccctccaggacgacgccatcatccgagcgcagtgcgtgctcgcgcaggggttgcagtacgcgaaatggcggggcgtgaaggtctgcctggggtttgagttggtcggcgatccgaccgaccccgaacagcgccgccaggaggaagcccgcatccgccacatgctggcgacctacccgatgctcgactacgtgtggttctggcagtcggagggcctgggcgggggctcgaacccgaatgccgccgacacgccgctcgacctcatcgtgcagcggatgcggcctgtcttcgagtacctcggcaacgagaaccgcattcacgaagccgcccggctggcggcctgggcccagttcgcgcatggcgtcgtgaagcggctgcggccggacatcaaggtgatcgtgagcggctggggcggggatgcgtggatgcggttcagcgacttctacgtcggcctcgaccaggtgctcccgaaggacatcatcttctccgccctcgacaacatcgaccccaccgcccagccccacgtgagcgaggcttacggaaagctgtcgcccgagcgcgagaagtggccgatcccgtggttccagtcagacggtggcggcacccgtcgcgaccagtgggggccccagtgcaatgtgaagccgttcaccgcgctcgtccgcgatgcgcaggcgaagggctcccaggggctgctcggcatccactgggagacgcgcggggtcgaggaggtcgccgcctactgcgcccaattcgcctggaaccccgacctcagctacgaggacttctaccggaccttcgcgcggaagtgcttcggcgagcagcacgcggaggagatggcccagattctcatgcagctcgaagccctcggcccgcgctggaccggcgggccggggcaggtggagtgcggaggcttcgagtggttctccgatgcgaggcggccgaagccggacaacctgcaggccctccgcgggatccggtcgacactgctcggcttcggcttcccagcgcccatcgtcgagggctacgcggatcgcgcccgctacctggtcggcaccctcgactgggtgctcaactacgacgaggccgctctggaactcgccccggacgggccgatcgcaaagctcgtggccgacgcggaggcctcccggcagcgcggcgaggctgacgcagcgcatcgcctggccgaggaggcggtcgcgaagatgacggagagcccgctcggcctcgccatgcggaactacaagctgcgactcacgagccagggcgacttcggcaatctggcgacgatcaacatcaaggcctatgccgccttcgtcgggctgtgggagagagcgtgcggggtgttggaccgcaagagcgctgtgccgccggaggccacggtccttctggaggttgcggcgagacaccacccgtccgcgctgccagagggcgtggcctacccgatccgcgcggtcgtcgtgagtgggcagccggtggcccgagtggcgctgtgctaccggaggccggccggtccgtggaagcaacggctgatgcagccacaggggcggtcgctgttcgcggcggagatcccccccgagttcgtcgggcccgacggaatcgagtactacgtcgaggccggcgacgcgagcaagactggcgcctgctggccggtcaacgccgaattccacccgtacacggccagcgcgctcccctaccacggcccggctgtgtatgggccatacctccaccgagatgtgtcgctcgcgccgtggggcggcgagggaggcgtgctccgcgcgaccgtgctctcggcgacggagtacgatgcggtgagggcggaggtgcggatgggggaggcggtcgtgcccggcgactccacgtaccacttcgtcaccttcccgctcgaaccgcaagtcgccggtcgcccggagctggccgcgacctgccgggcaacggatgcctccgggcacaccgggaccgggatggcggcgcggctcgccccctcgaacgcgcccgcggcgccgcgctcggtggcggcggagatcgccggcccgttccacgcgagggtcacgtggtcaccagtagacaaggccgcaacatacgaactgcatcgctccggtaagccggccttcacacccggtaaggacacgctcctcgccgagtggccgtggagcgtgtacgacgacatcacgatcaagccgagcgcgagctacgagtacgctgtcatcgcggtggacgatgccgggcagaggagcgccgcggcgcgcagcgcgacgctcaccgccggcgacttcccgctgcccgcggcgccgccgggcatcgcagcgacgccgggcctcggccgggttacgctcacgtggcagccgctcgccgagccggtcgcgggctatgcggtgtccatggccgatgccgccggcgagaagcgcgtcagcggcgaggcggctgtgaaggggactcagttcgtggtcggcgggctggcggacacgaaccggcgtcggttcaccgtgcgcgccgtcgaccgtgccgggaggctcggcgcaccgtcggcggaggtcgtggcggcggcgctccccctgccccacgagccggtgttccagacgagcttcgacagcgccacggctgacacaggccaggtcggcacgctgaacggcaaggcgacgatccacgatggcgtgctcgatacgcgcgagggcggctggatcgcttaccccaaccaggagctgctacaggtcagcgggccgctgagcttcgagctgtgggtgaacgtcgagcgcatcgaggccatcccggtggtcctctccttcggccactgggacgggccgggctactggctgcagctcttcggaggtggtgtccgtttctacctgcccgtccagaagatcctcgacaccaggccgccgccgccgctcggaagctggcaccatcttgcttgcacctacgacggccgggtcagccggtcctacctggatgggcaggagacggggagcctcgagatcggcccaatcgacctcaccctgtggggcggcgagctgcggatcgggcagtactccgacatcggcccggagttccagacccgggcgcagatcgacgaggtgcgcatctaccagcgggcgctgagcgcggatgaggtccgccgggacttcgagactggcaagcgctgaccgtcgacctcaggcaaccggtggggggccgaccccggcggctgccggtcgcctgctctcgacaccaacggcagcggcggtgttcaccgatggcagagggcatcgtcatcgttccatacgacgcgcaatggccgttcctcttcgccgaggtcggacaggccatccggaggacactcggttcggcagctctccgcattgaccacatcggatcgacctcgatccctggcctggacgccaagccgatcatcgacgtccagatctcggttgccgcgttcgacccgaccgaggcataccgtagcccgctgatggaactggggttcgtccatcgggcggagaaccccgacctgagcaagcgctacttccgcgagaagccgggggaacggcggacacacatccacgtgtgccgggcgggcagttggcgggagcagttcgcgctgctgtttcgggactatctgcgcacgcacgacgaggatgccgcgcactatgccgcggtcaagcgcgggttggccgcccattacggcgaggaccgcctaggttacacgaacgcgaaggcgccgtgcatctgggggatcatgcagaaggcggatcgctggaaccaggaaatcggatggacgccgggaccctcagatgcctagagcatctggcggcacccacggcacgggtgctcgtgcctgctgcacggcgccacggatagaggggagcggccaggaatggcaggcgagcccagtggacggctgaacgcggtaaccggtgtcgcgggctacagcggccggcgcatggctgagcggctgctcaggatgggcgaacgcgtcctgacgctgaccggtcacccggaccgaccgactccctttggggagctggtgcgcgccgcaccgttccacttcgaccaggcggacaagctcacggagagcctgcgcggcgtcgaggtcctctacaacacctactggattcgcttcccgcgtggcggcatgacgtacgagaaggcggttgagaacacgcggacactgatccgggccgccgtccaggcgggcgtgcgccggatcgtccatgtcagcatcaccaacccctcccacgactcgccgttcggctacttccgggggaagggccaggtcgaggacgagatcgtcggctcgggcctcagctatgccatcctgcgtccggcggtgctcttcgggggcgaggacatcctgatcaacaacatcgcgtggacgctccggcgcctgcccgtgttcgccatcccgggctcgggcgagtaccggttgcagccgatccacgtggacgacctcgccgacctcgctgtcgagcacagccaccggcaagcgaacgtggtgctcgacgcggtcggccccgaggcctacacgtacagcgatctggtacgcctcatcgcggccgccatcggccgccgcccgctgttggtgcacctcccgcccaggctgttctactggctgtcgcttcccatcagccagctggtccgcgacgtgctcatcacctgggacgaggtgctcgggctgatggcggacctgctcgtgtcgagcgggccccctacggcccctacacgcctgagcgactggctgacggagaaccggggagcggtcgggaggaggtacgcgtcggaggtggaacggcactttcggtaaggtgtaggagaggcggccccgacgagggtggtgggtgggccagcagcctcgcccttgaaccggcggttgactccgctactccttgcctgtagtatcagcagcgcacggcggctgaggcaggctgtgcttgcgcagaggccgcccgcgggcgccctcgtcgtcggcccatcatctgcacctgtgcaagggtgagaccctatgctcgacatggagatccgtagcggccagtgcggggagccgttggcctgggcgtcggatgtcgggttggtgcgggttccgttgtttggggccgcgaggcgtacacagaacgtgcgtcgcgattgtgcagtcttccttgacggcccctcgtccagcttcgcgctgtgctcaatggacgacgaccatcgcccgtatgggggggacgagccgcgctcatggtcctggtccgcgaacctgcgccatgtcctcctgctcgatcgtgacgagttgatcctgcggaggtgggattcgtggagccgggttgagcgcgtctcgctcccaggttcccgcaacgctgccgaacggctgcttgcacatcttgcgtcggccccacaaccgcacgcgccggacgtggtcgtccacatgctgagggcgttccggcgactgcgggcctcccttgggtcgcatcaggctctggacgcgatccgcatcttcaacgccttcctcgttgggaccgagttggtgaggttgggggccgttggccaaggggagtggctccgtgcgcgtacggtccgcgacgcactcaaggagatcgactcgggcgacctcgaggggaccgaggtcggggacgtcagccgtgacgtcctgggctccatgataggacccacactcgcggacttcctgcagcccgacccaggcggtgacctgcacctcgagccggacctcctcttgcggcatgcggctggtgagctgtaccaggaggctcacctcgtcattggccaagacgaggatcgtgccttgcccgggctgggtggcagcgcgaggccgcgcggccgaccgcctcgcgacgtgcgcttcacacgcacagccctagcccgcgcgttggtcgagcaggccttcgactcatgtactccgcccatagcggcccggaccgtggtggacgttctggacccggcctgcgggtccggggttttcctgcaggaagcgctgcgggagctggaggcgagggcgtttcggggaacagtgacggttcgcgggttcgacacctcgccgctgtcctgcgctatcgctcggttctgccttacgcgagcgaagcgcgacgccgaagacaaaggcatgagtgtcagccttcggatcgagaagtgcgatgcgctcggggccgactggggcgcacctgatgtggtactgatgaaccccccattcgcctcgtgggaggatctgcacggccaggaccgggagggggtggtcgaggtacttggcccgctgcggacgggccgcgctgacaaggcgatggcgttcgtgtggcgcgcagtccaggcgctcaggccgggggccgcactgggggcggtactccctgctgctgtgcttgagagcaaggctgggcgaaagtggcgggaggctctccttgaccaggcctccctgcgcctggtcgggcgtttcagggggtatggcttcttccgcgggtccgtggtcgagcccagtttcgtggtcttgcggaggcccgcggctggtggcgcggtaactgagccggttcgtttcctggtcgcccgggaagggtcagaggacgctgcacttcgtggtctcaggcagccgctgccgaccggggatggcgacgtgacgcctgcttgggagctgtacgagaccccggcaagcggcacccgcccggcaagctggctgccatggccggaacgacagcgccgcctggtcgccgagcttggggccgcgggcgtcacccgcgtccggcacctcttcggggtccggcagggagccagaaccgggaggaggcgggtgttcctactcacgcagcatgagtacgaccgccttcccgagtctgaacgccatctcttccgcccggccgctggtagctccacaatcattgacggacgcattgaacagacggagttcgttttctacccctacggtgccagcgagattgccacggaggatgatctcccgcttcacgtccccacgtactaccgtgaccggttgttgccagcgcgggcgtacctagcggcccgccgcggagttgacccccagaagtggtggcggcttacgcgggaaagggaatggcaacgcgtgccatgccccaagctggtcagcaaggccttcggtcggcagggcagtttcgcgtacgactgcgagggcgcgttcgcagttgtccagggcttcgcttggttctggagggggcgcgggcgccggactttccacgcgtcgaggcttccgtgggcctacctcgccatcctaaacagcccggtcttcgagtcgatcctatcctgcttctgcccccgagtacagggtgggcagttcgagctcacaaagaagttcgtagacgaagctttcctgccggacctttccgacgaccttcggttcccgagcgattttgtgcaggagctcgaactgctgggccgacggatacacgcgggcgacatgtccgacttctctgacctgaacggaccatcgctggtggcgtacggccttcccgcgaaggcagtcgcggtgttgaccgacgtctaacggggcacccgatggctctgactgcagaggcgggcgtcatcagaggtcttcaccggcgcctctgcaaggccgtcgagggactactcggccttcacacaagcgtgcacgagggcgctggctggcagcacgcgggggagcaccagaggatcaccttcgggctcaccaacccccacattccggacttcgctcctctggtgagggcaggccgcacatggccagtcatgccgttgttcccggaacaggcggaagacctgcaggaatgtgcctgggccgggtggtcggagctctggctggggactggacgccgggtgttcgcccttgatggggtccagtggagcttctactggggcaacccggggcgtccgaaacgtcttctcttccgcgccgggtgggtggcggccgacttgcgcgccgccaaagctccgcaaccccactggcacttcgacagtcggacagtgtgggagaccacgatcccggtcgacacagaggctagcctggaggtcgtcgaggtccgcctggagtgcccgccagaagggggcccgtcctacggcgaggccccgccctcaggcgtgcctgctctactcgagtacgatctgtccggcctgcacctgggcatgggcgggtgggaccacccaggggaacaccccgcgtgctggcagtggtcaccccacagcgtagatgcgcttgtggaatgggccgcccgcacgctctgcctcgctcgggccgagttcgaccgtctgaggaccaccacggtgacgtagccggcacaccactgccgctccgggggcggacgcagcgccacaagctcggccgtctgggcaggggcttcgccggcgccatggggctgcacgggtaggaggcaccgtcggccccaggcggcgggctccagtgagccttgacctcgacctcggcccccaccaggacggcgagccgtcgatgtggatgctgcgggtcaggccgctgtcatcgggttcgatgaggtagatgtgccactgctcgtcgcgcgaccggtcgcttcggaaggcgatcttctcggtcgtgggggtctggcagatcgggacctggcccgccagagggccgaccagagctcggcgcacgttcgtcccgtcgtgggtcaccgctccgcccccacccccacacccctgtacggacacagcgcacacgaccaacaccaccgcccctcccaggaaggctactgcccgtcgcatcggtctcccctccccttggaggtcacgcattgggtctccgggagacgcgtccgcactgccatgcgattcttccaggatgggggctgcgaacacctgccgcagccggaagctggtcgcccccgtcctccgtccgctacccatagaacctcggccgtcggctgagctgccgcgggatcggcagcgggagccagggagtgtcgccgaccttggcgtggatctggtcgatgagctcagcggcggtcagctccgcctggtcgccctccgcgcggcggcgaatctgcagcttgccctcgagcgtctcccgctggccgaccacgatggtgtaaggcacccactcgacctcggcgtctctcaccttgcgcgagaccgactcctgccggtcgtccacgtcggcgcggacgtggcccgcagtgaagacatcggcgaactggttggcgaggtcgagggagtgctccttgaccggcaccaggcgcacctgcgtgggcgagagccatagcgggaacatcggtggcgtgccccggtcctgatccacggcgatgttctcaagcagcgtacacatggtgcgctcgatgctgccgaagctggaggcgtggaggatgaccgggcacggcttgaaggtgccgtcggaatcgacgaagccgatgttgaaccgcgggccgtccttcacgtcccactgaaccgtggagacctggatgttcgcgaggtcgcgggtgatgctctggaactcgttcttcatcgcgtagtagtgggtcatctcgggcatgagcttgaagaacgccggcacctgcatctcggcgccgaggccgatgaggtagtcgcggtgctggtcgaagaactcggtcgtcccctcccagcccaggacccatcggctgtgcgcgatgacatcgttcatgagccggccgaagcgcagcgtgaggacgcggaactcctccagcgcctgctcctcgttcgcgcaggcggcgtgcatgtcggtcatgaggaagttgcgcacgcggcggaggccgctcacctccccctcctgctcgttgcggaagcaactcgcctcctcgtagagcttcagcggcgattggtgaaggctgaagcggaccttctgcatgaaggggaagccgagcgggtcgctggcgtaccggaggtagcagacgccgcggccgccgtccaccttgtagtcgcgctcgtggaactcgcccatcagctcgccgacgacgttgttgtcgccgcggatgacgagcgggttgcgcatctcctgcgcgccccattcgagcgcgagccggcgggcgtactccaggagcagccgcagcatcagcacgcccttggggtaccacttgtagtggcccttctcggagacatcgcagtagtcgatcagctcatggtggcgcatcatctggatgtgcgccggctcctcgccgcccgactccccgcgcccgaactcgttggccacgaagtgccgcaggagctggtagaccggctcggggcgcgagaggacctcgcaccggtcgaggctttcgcgggtgaggtcgtacgtcttcccggcgaggtcgacgaggaggtagcgctcgaacttgtccttcccgacagcgacctccggctccgccttcgccttgccctcggtgacggcatcggcggaaagctgcgcgctccactcggaaagcgggtggcccttggccttgaggtcgaagcccttgtaccagccgaagggggagcggaagacggtcaggtcaccgccctggagcttcttctccgcggcgcggaggatgttgagcgcggtgcccggcgggccgggctcggagaccaggtgaacatacgggtagagcaccacgcggtggatggcgagcatcctgctgcgctcgcggacgtgctcggcgagcgcggtcgccagagcatccggcgactggccggcgtcggccttctcgaccccgacgaagaagacgaggcactcgtcctcgatcgtgcgcgtctcctcgggagtcgcctccggctgttcgagcgccttctcggtgacgaaccatcggaatgagtcggtgtgaatgccaagcacacgcatgtcgttgaccaccagtacacgaagtggcactggcagccctgctgccggtgctccgccgttcggtgaccttacccattctcggggcgcgcgtcaagaaggcgagggaacggggatgcgatccggactcgtaggcgcttctgtccgcgtaggtcggtcgctccgcgaccgacaaggcgccgtcggtcgcggagcgaccgacctacgcgacggcgcgggcaggattgcggcgccgcagcgcgaaaggtggacccaaccaggggggcgcaagatgatgaccgaagaggagtacgaggggtttctcgacgatctccgcaagctggtggtgggcacggtagttgagagcgtcgaggcttgccacctcgattccgaggactggttcacactggtcgtcaaggcggagagcggggagaggcgcaccgtccagataggtggcaacgaactcggtgtctggatcaggggccaaccgggctacccgcttgactgaggcctcttgcggccggggactgccgccggttcgtgagtgtgactcgtacccggggggacagcgtaggacgacacggcacctgggcaagggcaagcgcctagcgccgccgcggccctacccctcgccgcacggggccgagacggggacggctctcagcaggcacttggtcggaccgaaggagcctacgcctgagtatcgcagcatgtcgattgggtcgcaggtcgcctgagacagccacttgtagtgcaggaggtagaacgtcagcagggcgttcttctctgcctcaactaggtcgagatcggggaaccgggggccccatccgggttctacccaggttacgtcttcttcagtgcgcccccagcacatcacccacctgtccaagcagagcaccgagtcgatgagccgcggggtctctgccctcctccagtgctcggcggctgcctccgcgagcgtagccggattgatggccgtatacgcgaacacgctatagaggagggggaagttccgtagctcccgcccggcgacgttgaacctgagctccgcgtcagaccggacctcggtgtatgcatcccggggtaagcccttcactgcgtcgcagtcgcgcaagcacttcccgaactcgcagctatcgaggtcgctcttgacttcaacgacggcgtaggcgccctcgataggcactagtctcgtgtccccaatgccaaggcggggcactttcatgcggtcgatcacgatcagatcgcagtggcaggactgaccatccctggcgcacagctccccgctgaccacatcgaggtgctgcggcaggtgctggcggaggaactcgctgaccgtctcctcgcggcagcctccgcgttcgcccttgtgctggaactggctcgataggtgctcgaagtccgcacgcatcttcgccgccatggcctgcatcatgtcttgtaggttcacggacactcccctccttggttcgtcgccaggcgtcggtcactgccagtgggcttgtttgcgatctggaggccggcctgcgtctgggctcctccatgttgccgggacctcaggacgcggcagcgaggcgaggcagcgctcctggctcgcgcacgagagcccgccagcggaacgagagcgccctgcccttcagtacgcccccctccccctcaggaccaccccgattgtcttcagcacgatgaccaggtcgaggaggagcgaccggttggtgaggtagtagaagtcgtattcgatgttgtcgcggagggggaggtctttgcggccgaggatctgccagaggccggtgaggccgggcttcagctcgaggcggcggcgctgccagggctcgtaccgctccacgaggaacggcatctcgggccgggggccgacgaggctcatgtcgcccttgatgacgttcacaagctggggcagctcatccagactgtagcggcgtagccaacggccgatgggggtgatgcgcgggtcatcctcgccctggggactctcggcgtagggctcggcgtcgctccgcatcgagcggaacttgtagagcgtgaagagccgcccgcccaggccgacgcgcttctggcggaagaggggtgagtcgcccgtctggcgcttgacgaggaggctcacgatcagggtcagcggcgaggccagaatcagcagcagagccgcgaccacgacatcggcgatgcgcttgacggcctgctgccagaggccgaagggggtctggcggagggagatcgtgggcaggtcggtgaggccgctgatctgcgcctgacccgtgagcacggcgaacgggcccgcgatgacgtggaactccaccggcaggccctcgcactgggagaccacgtcgagcagctggccgggctcgaggtcgggatgggcgacgatgacctcgtcgatgccgaggtcgcggacgaaggtgggcaggtcggcgagcttgcccacgacggggacatcgtcgatggtcggcgggtcggagttggtggaaacgaacccaacgacctggtggccgaactccgggtgctcgcgggtgcggcgcaggacgaggcggccgagctcgccacaacccacaatcagcgtgcgcgcccgcgctgggccggtcgccagggccgtcgcgcggtggttgctgaggaccgtgcgcccgagtgagacgtaggcgagcgcgcagagccagaagaggatgagcatgccgcgcgagtagtcgatgtggctgaggaacgagaccgcggcgaccatgagggtggcgagggtgacggcgcggaagctgtcgagaaggtcgtggaagggcggcgcggcacggctgacgcggtagagacccaggctctcgaacgtggcgagccaaagcggcagaatcgccgggagcgtccagaggtacatgccgagcgggtgcttgagggtcggtcggaggatctcaggggtgtagacgcggacagcataggctgtcaggatggcgagggcgcaggaacccgcgtccgacaacacgagcagagcgaggtgtctgcgctcgaagacgcggcgggtggaagccatgtgaaccagtcccagaacccctggcccgtggcagcggcgactcgccgatggcccacagcactcgcgcgcgacccttcgacgtcgctcagggtggtgagcctgtcgaaccagtcgcgcgtgtcacgcacagcgggcgcgtgccatctggtatcggggacaaccgggggaagcgattgttccccggttttgccttcggcccaccttctggtatactgacgccggcgcacggactctctctgcgaggcaccaaggtgattcccaaaggcaacgagccgattcggatggtgatgggagacgaccacgccgttgtgcgcgagggtatccgacggatgctggccggctcgcgggtggtcgtggagggggaggcctcgaccggggccgaggccgtggagctgacgcgacgactgaagccggacgtcgtgctgctcgacatacgaatgcccggcacggacgggctggccgccctgcgggagatcaagcgcgagctgccggagaccccggtggtgatgctgaccgcctacgacgagccggcgtggctggtgcaggccatcgcgcacggcgcggccggctacctgctgaagagcatgtcgaaggaggacctcgtcgccgcgatcgtggcggtcgtgaacggggacaacctcgtgaatcctgcccggctcacggaggtcatccagcggctggcctcggagacgacggacgcggggacctccgtcaccggggaggcaaacaagctcaccgcccgcgaaacggaagtgctcgccctgatgaccgagggcttgaccaaccagcagattgccgaagtcctgagtgtcgccccgagcaccatcaagagccacgtccagaatgtcatcctcaagctgggagcctccgatcgcacccaggccgcggtcatcgcggtcaagtcgggagttgtcaggcgcccggaccgctagagtggatctccgggcttcgggctccggggagccgctggtggcgcccagcgctcgcgtcagcgggggaaccgaatggcgcgcgtgtgcgtcctacccctgtcggcagatgactccattgacacggaaggatggttgctacatggtcgccccgaagacgagccgcattgttgtcctgtcgttggtcgccctggttgcgctctgtgctctacccaacctgacaggctgtggcagcatggattcccccacggtgcccatggtggcaccaacggccgagccctcggccggcgtctccgccgccccaaccgacactctctcggccgtagccaccctgacgctctcgctctcgaccaccctggacaatgtgacgggcacagtcaaggcgacgtcgatcacgagtgcggacctcctccagaagggcgccgtagtgaagaccgccaccatggccggcggctcggcccaattcgacatgaccgggctggccaacggcgactacttcatccgcgtgaacaacctggccgctgacctggtgccaacgcgcatcaccaacgcgaccacctccttcactcagttcgtaggccagaaactgcggcaatcagtgatcggcactttggcctcgcccaccttccgcatcctgacgttctccaggggccaggcgcagacagcgatcgtcgcgtactccaccggcgcggttctcataccagccaagtacgcctacgccatccagtcgctgaagaccggcaagaagctggacacgctgacgctcggcacggccgcgaagctggcctcaacgccgaccggcggggagcatccggccacgtgggagatcggcccgagcaaccacggcaagagcgcgagccaggcgagctgtggcgactgccacggcaacctcaactcgaagcccgcgacctaccccggcatctccccgagcaatggctggtgctaccgctgccactacggagcggccggcgccacagcggggatggtgaaccccaagaagtagacggcagaagccagaagccaggagaacggcaaaggcctcgcgccaacgccgttcttctggcttctgactcctgacctctggctcctgccgtttccctttcccccctcccccgtttgggggagatggatttccccccttcgggtgacggagacttccccctctcgccgtacaatcagactggcgtccctggcggaatcgcagtgccctcaggagggatgcgcggtgacgctagcccgggcgatggaagtgctgaaggccgagctggttgtgcgagcgcgcgatgaggcggccgcagtgggcggctgcttcgccgccgacctcatgagcgacgttctggccttcgcccgggaaggctccctcctcctgaccggtctcgccaccgaccagacgatccgtacggccgccatcaagcaccttgcggccgtggtggtcatcgagggcaagcaggtcggcagcgacatggtcgaggcggcccgggaggagggcatccccgttctccgcacgccgctctcgacgtacgaggcttgcgggctgctgatgcaagcggggctgcggccgtaccgaaaggccgcctccgtatagcacctggggcgctggcagcgaggctgccagcgccccacacgagtgggcgatggacgatccggtgctggcacacgaggagttcccgattctgggccgcgcctatttcctgggcgggcgcgcgtccacgtcggtgaagcgggcgctgtccgactgcggagtcgatgcggagacgatccgacgcgtgagcgtcgcctgctacgaggccgagatgaacgtcgtcctgcacgcgcgctcggggtatctctcgctggacgtgcacgcgggccgggtcgtgcttggcatcgccgaccgggggccgggtatcgaggacatccaactcgcgatgacaccgggctggtcgtcggccaccgaggaggcgcgcgccctgggattcggggccggcatgggcctccccaacatcaaggagcaggccgacgagatgaggatcgagagcacggtcggcgagggcgtgcgactgctgctgaccttctaccgcgggggacggcaagatgcctgatgaagcgccggtgacggtcgcccaggcggccggacagcttggtctctcggcgtatgcggcgggcgaggcgatcgactccgcgatcacgggcgccgtcgtgagcgacctgctcagctacgtcatggcgaacgggaagcgcgggaacgtgtgggtgaccatccagacccactcgaacatcatcgcggtggcggccctcgcgggactgtcggcgatcgtgatcgccggggggttcgagcccgccgacgacacggtggcacgggcggaggaggaggggatccttgtctttgcctcggcggagacggcctacacggtggcggggaagctgtgggagatcggggtgcggtaactgggagaacgagtctggaacgttcccccgcgaggcagatgaatggcggaccgggttcccgcagacctgcacgtgcacaccgcgctctcgccctgcggcggcgacgagatgaagccggcggagatcctgctgaccgcggagcagcgcggaatccgggtgctgggagtcgtggatcactcgaccgcccagaacggttgggcggttgccgaggcggcgcaggcgttcgaggtgcgcgtgttcgtggggttggagatcgagagcgccgagggcgtgcacatgctggcgctgttcgatgacgcgagggccggcatggacctggatgcgctggtcgctgcccatctgccgccgctccgcaaccgccccgatctgttcggcgagcagttcctgctcgacgagtggggggaggtgctgggcaccgacgagaggcttctcgccgcggccaccgacctcagcctcgaggagatcgccgggatgacggcggcgcacggcgggatgagcattcctgcacatatcgatcgcaccgtgaacgggcttctgcccctgctcggtttcgtgcccccggctctgcgagtggacgcgttcgaggtgtcgcggcacatgacgcgggcggaggcgagggtgcgctggcccgagctggcggagcggccgctcgtggccgggtcggacgcgcactacctcgacgagatcggcgcggcctacacctggatctcggcagacctggcggaggcgccggttggggtgcgcgagtggggccagcgcctggcgcgcgagatgacgagcttcggtgactgagacccatgcgggagatcgcacttcacctgctggatgcggcgcggaacgcggtcgaggcgggggcgaccgcgatcgctttgactgtgacggaagacgccaaggccgacacgctcgagttcctgctcgaggacaacggcaagggcatggacccgggtacgctggcgaaggcagcggacgccttctactcgacccgcactacccgccgggtcggcctcgggctgccgctgctcagggctacctgcgagcggtgcgggggcgacctgcagatcgagtcgaggccgggagaagggacggtggtgcacgggaagctccaactgactcacgttgaccgcccaccgttgggcgacatgggcgccgtcacccaggcgctggcctgcgagtcggaccatacatcgttcaggtaccgccaccaggccaacggggcgacgttcggactcgacaccgtggaactccagagggaactgggcgaggtgccgctgaccgatccgcgggtgctgtgttggctggcccagttcgtcaacgaccacattcgggacgttgggagcaaggcatgaacgccggctgccatgggaggagcgacttcagccgcggctagccgacagaggggatcgcggctgaagccccccttaccgcgaccgtgagacgaccagaagggagcatcgagagggtgaagacccgagaggaactgcaggctctccgtgagcgcgccaaggcggcgttggctgtacgcgacagccagggccgcgcgcgtgttgtcgttgccatgggcacctgcggcatcgctgccggggcccgcgaggtcatgtccgcgttgctggacgagctcgcgctgcgtgacctcaccgacgtggccgtatcgcagaccggctgcaagggcctctgcgatagggagcccgtggtcgtagtgcagacggccgggctgccggcggtcacctacggtcgggtgacccctcaggccatgcggcgcatcgtggccgaccagatcgtcaacggccaggtggtgtccgagtacgccatcatgaccggatcggaggccagttgaaccatggctgaggcatgtgtgtgtgaagaggtctactccaagatcgactggatcatcgaccagaagggcgccgaaacggactccctgatcgagatcctccacgcggtgcaggaggagatcgggtttcttccacaaggcgtgcaggagtacatcgccgagaagctcgacgtcccggcgggggtgatcgagggggtcgtcaccttctacagcttcttcaccacggttccgcgcggccggcacaagatcaaggtctgccagggcaccgcgtgctatgtgcgaggcggcaagcgcgtcctcgagcaggtctccaagcgctgcgactgcactgtgggcggaacgagcgacgatatgcgattcagcctcgatgtggtgcgctgcgtcggagcgtgcggcctgtcgcccgtgatggtcgtggacgacgacatctacgagcgcgtcaagccgaccaaggtcggcgacatcctcgggagatacgagtagcgcccgcgcgcggctgtcaggaaagggagagagaccttctcatgcctaccttccgatcacatgtacttgtctgcgcgggggcggggtgcgtgtcctccggctgccaggccgtcgcggaagcgatggaacaggccatcgaagacagcggcctggaaagcgagatcaagatcgtgcgcaccggctgcatggggtcgtgcgacctcggtccggtgtgcgtcgtgtaccccgagggcgtgttctaccagaagctgaagcccggggacggagtcgagattgtcaaggagcaccttctgaagggccgcccggtcgagaagctgatgtacgtgccgccggagggcgccgagccggccctgaccatggagaagatccccttcttcgcgctgcagaagaagatcgtcctgcggaactgcggggagatcgatcccggcaacgtcgaggagtacattgcccgcgacggctacgagccgctggcgagggtgctcaccgagatgacgccggaggaggtcgtcgacatcgtcaagcgctccggcctgcgcgggcgtgggggagcgggcttcccgaccggcctgaagtgggagttcaccgccaaggccaaaggtgaccgcaagttcgtcgtgtgcaacgccgacgagggcgaccccggcgcgttcatggaccgcagcgtgctcgagggcgacccgcacagcgtcatcgaggcgatgaccattgccggctacgcgatcggcgccaggaagggctacatctacgtgcgggccgagtacccgctggccatcgagcgcctgtcggtggccttggcccaggcgcgcaactacgggctgcttggggagggcatcttcggctcgaactacagcttcggtatcgagctgcgcatgggcgccggggcgttcgtctgcggcgaggagaccgcgctcatggcctcggtcatggggaagcgcggcgagccgcatccgcgtccgcccttcccggcccagagcgggctgtgggactcgcccacgctgctcaacaacgtcgagacctacgccaacatcgcgcccatcgttctcaacggcccggagtggtacgcttccttcggcaccgagaagagcaagggcacgaaggtcttcgcgcttgcggggcacgtgagcaatacgggtctggtcgaggtgccgatggggaccccgctcggcacggtcatcttcgacatcggcggcgggatccgcggcgggcgcaagttcaaggcggcccagagcggcggcccgtccggcggctgcctccccgccgagacgctcaacgtccccatcgactacgagaacctgaaggccctgggctccatcatgggctccggcggcctgatcgtcatggacgacaccacctgcatggtggacctggcccgcttcttcctggagttcgtccaggacgaatcgtgcgggaagtgccccccctgccgcatcggcacgaagcggatgctcgagattctcgagcgcatctgccggggcgagggccgggagggcgacgtcgagctgctgatcgacctgggcaccgaggtcgcgaacacggcgctgtgcggcctcggccagacggcgcccaaccccgtgctcagcacaatccgttacttccgcgacgagtatgacgagcacatccgcgacaagcactgccgcgcgggcacctgcgccgacatcatgaaggccccgtgcgagcacgcgtgcccggcgggtgtggatgtgccggcgtacgtcagcgcgatcgccgaggggcgcatcgacgacgcgtacgccatcatccgcgacacgaaccccttcccctcagtctgcgggcgcgtctgcacggcgtactgcgagctgcagtgccgccgcggccagctcgacgaccccgtgtcgatccggctgctgaagcgcgcggtggccgacctgcggaccacgacctggatgccgtcccttgagccccagcgccaccggaaggtcgcggtcatcggtgccggcccggccggcctcacctgcgcctacgacttggtgcggaggggctacgatgtcacggtcttcgagaagcggcagatccctggcgggatgatggcccttggcatcccggactaccgcctgcccggcgacgtgctgcagcgggagatccaggacctgctcgacctcggcatcgagctgaggaccggtgtggccttcgggagcgacgtgacgctgaccgatctcgagaagcagggctacgaggccttcttcctcgccatcggctgccacgtcgggatgccgcttgactgcccgggcgccgacgcgaagggcgtgctggatgccgtccagttcctgcgcgatgtcgcgctgaacaagcagcccgagatcggccggaaggtggccgtcatcggcggcggcgacacggctatcgactccgcgcggtcggcgctgcgcacgggcgccgaggaggttcacctcgtctaccgccgcaccgaggatgagatgccggcgcacaaggcggagattcaggaggcccggcacgagggcgtgcagttccacttcctggccgcgccgaaggagatcgtcgtccaggacggtcgcaccgcccggatggtctgtcagccgattgagctgggcgagtgggaccgcagcggacgccgccgaccggtgcccgtcgagggcgccgacttcaccctggacgtggacaccgtgatcgcggccatcggccagaggatcgacacctcctgtgtctctgtcgacacggacaatggaaagatccgcgtcgacccgatcaccctcgccacggccatgccgaacgtgttcgccggcggcgacgcgattccgggagcgatgaccgtggtcgacgccatcgccgacggccatcgcgcggcgcgggccatccacagcaccctctccggcgagccgcttccggcgccgaagcagcggaaaaggacgcgggtgaccgaagcggtcatggcgcagctcgaggagacggcggacgaggagaagcccgcggccgaggtggcgacgatctcggatgcctaccggcgcagcgggttctcggaggtcgagctcggcttcacgctgcccgtcgcgtgccgcgaggcaacgcgctgcctgcactgcgactatgtcatggtcgaggaagaggcgtaggacggctacccgaacctgactgcacaggaggagacgagacgaatgtcacagttcaccatttcgatcaacggtcaggaagtgcaggcgagcccgggaatgaccgtcctcgaagccgcgaagagcgcgggcattcgcatccccacgctctgccaccatcctgacctgccgcccatgggcgcgtgccgggtgtgtctggtcgaaatccagggggagcgtgtgctccagccggcctgctccttcccggtgcgcgagggcatggcagttcagacgcactcgccccaggtcaggaaggcgcggaagacggtcgtcgagctgttgctctcggaccatccctccgagtgcacctcctgcgcccgcaaccagaactgcgagctgcaatcgctggcggacgagctgggcatccgcgaggtccgcgtgaaggcggagccgcccgggcacccgatcgacgactccagcctctcggtcgtccgcgatcccgacaagtgcatcctctgccgccgctgcctccagacctgcgagctgatccagggcgtgtccggcctgcggatcaaggggcgcgggtacgggagcatcgtgggcgcggccttcgacacgccgctcggccacgcgctctgcgtcaactgcggtcagtgcatcaaccgctgcccgacgggcgcgctcaccgagaagacgcacattccggccgtctgggcggcgctggaggacccagagatcgtcaccgtggtccagacggcgccggccgtgcgcatcggcctgggcgaggcgctcggcatgccgccgggggagatcgtcacgggcaagctcaccaccgccctgcggctcctcggcctcgactacgtgttcgataccgacttcaccgccgacctcaccatcatggaggaagggttcgagctgatccatcgggtgaagaccggcggggtcctcccgcagctcacctcctgcagccccggctggatcaagtacatcgaacacttctacccgcagctcctgccgaacctctcaagctgcaagtcgccgcagcagatgttcggggcggtggcgaagacgtacttcgcccaggaggtcggcctcgacccggccaagatgcgcgtcgtctcgatcatgccctgcgtggccaagaagttcgaggctgcgcgccccgagatgaacgactcgggctaccaggacgtggactacgtgcttaccacccgcgagctggcgaagatgatcaaggagaagggcatcgacttcgccaacctgcccgagagcgactacgacgacccgctgggcgagtcgaccggcgccgcggtcatcttcggcgctaccggcggcgtgatggaggcggctctccgcaccgcgtacgaggtcatcacgggcgagaagctggagaacgtggacatcgcggccgtgcgcgggatggagggcgtgcgcgaggcgacgattcaggtcggcgacctgccggtgaaggccgccgtggcccacgggctcgggaacgcggcccaggtgctcgacaagatcgccgccggcgcgggcgactggcacttcgtcgagatcatggcctgccctggtgggtgcctcggtggtggcgggcagccgatcccaacctcaccggacatccgcaagaagcgcgcctcggcgatctaccaggcggatgtcgatctcccgatccgtcggtcgcacgagaacccgtcgatcaagcggatctacgagaagttcctgggcgagccattgggcgagaagtcacaccacctgctgcacaccaagtacaccgaacgaacgaggaagcccgtccaggtcccggtggagggaggctaggcatgggcccggggcggacgggcggaagcccgtccgccccgttctgatcgtggcgactcgccgtagcggtcccaggaacagaatcctcgaggtggagtggtgaagatggcagcgacgagggtagactggtctcgtgaggccatggacacgatggctctgcgcatctgcaacccggccgagatcgaggacgcgctggcggccgggagggctgcggatgggtcggcagtgcgggacgtggtgcaccaggcgctgacgctggaggggctctcgcccgccggggcagccgtcttggtccaggtggacgacccggcactgcgcgaggagatcaaggcggcggcgcgtcaggtgcaccggaagctctggggcaagcgagttcggctccacgcgcccatctgcccgaccaatcgctgcgtgcaggactgcctctactgcccgcttcgccgctccaacgcccggctgacgcggcgggcggctacgccgcgagacctccagcgggagaccgcgggcttgctcgacgagggccaccggcacgtgctgctcgtgttcggcgacgaccggagcggggtgcagtacgtgcgagacatggtgtgggcggcgtacggcgtgcggtcgggcataaggcagatccagcgggtcgacgtcaacctcgatcccctgcgcgtcgtcgacatccaggagctgagggacgcgcccatcgggacgtaccacgtcttccaggagacctaccatccgggcgcctatgcggccctgcacccggacgggatgaaggccgactacgcctggcggatcaccggccatgaccgcgcgtttggggccgggctcgacaacgtcggcctcggcctgctgctcggctcgcacagcctccggttcgacatcgtggcgctgctcgggcacgcgcggtaccttacggagacgtacggccggcccccacacacgatcacctacgctcgcatgctgtcggcggcaggagcgccgccctcgcaggggcccgagcgacgggtcagctccgaggacttcacgttcgtcgtcgcagtgacccggctggccgtcccctacacgggcattgtgatgtgcacgccggcttcttcggaggtgcggcgggagctctacgggctcggggtgtcacaggtcagtgtggggtccctcagctacccgggcgtctacacggcggacgggcaactggaggggggcggacagctcaccatcgggcggccccgggcgttggaggaggtcgtccatcgcatgtgcgaggtgggcttcgtgcccaacttctgcacggcgtgcttcgcgcagcgccgacgggtgggcgggcccgaccggacggactccgagacgcgcgtccaggaccgctgcgcggcgaacgttctcctcgggctcagggagtacctgatggactatgcctcgcccgagacgcagacggtcggcgagcgactcattcagggcgagctggcccaactgccggagagcgtgcggagcgtcaccttcgagtacatgaaggaagccgaagcaggtctccggggccagatgctgtaactaggtaggatggcagcggtgggggctgccgttcctgggaccgcgagcatcctgcccgcagacgtggtcacgccgccgatgcgagcaggtctccggggccagatgctgtgactagataggatggcagcgatgggggctgccgttcccgggaccgcgagcatcctgctcgcagacgtggtcactccgccaatgcgagcaggatgctcgcggtcccaggaacggcatatcgcttgtgtacgcctgttggaaccccggactgacgaggcacggctttgccggatcgtgacgggcagcccaaaggggtcgtcaccaccatcgccgcgaggtgccggcgatgctacaactgcgtgcggagctgtcccgccaaggcgatccgcgtgcagggcgggcaggcctgcgtcattgaggagcggtgtgtcggctgcgggaactgcctcagggcgtgcgcccagaacgccaagcaggtccagcccgcgatcccccaggtcgagagcctcctcgccgaacctagccccaccgtcgccctcctcgcgcccagctaccccgccgcgtacgccgaagtcccggccgggaaggtcgtggccgcctgccgcgccttgggcttcgcccacgtgatggaggtcggtttcggtgcggagatggtcgcccgcgagtatgcgaagctcctgggggccgcgccggaccgaccggttatcagcactccctgccccgcgttggtgagctacgttgagaagtacatgccggagctcgtgcccaacctcgcgcccatcgtctccccgatggtcgcgctcgggcgggcggtcaagcagaggtacctccccggcgcgaacgtcgtcttcatcgggccgtgtgtggcgaagaagatggaggtccgcgacccggcggtcgccgatgccgtcgacgcggcgttgaccttccgcgagctgggcgacctgctcaaccagcgcgggatcgacctgcgcacgctggagtcctcaaccgccgacgcaccactgccccacttcggcgccgccttccccctgggcgggggcctgctcaaggccgccgccatccaggccgacctgttggacgatgcgatcaccgtgatcgaaggccccaacacgtgcctgaacgcgttgcgggagctgcaggcaggggggttccccgcccgcttcctcgatgcgcttctctgcaaaggctgcatcgccggcccggccttcagcggcgttctcagtcccttcacccgcaaggcgctggtcaccgcgcatgtccggtggctggaatcgcatcccggcgcacgcgcaatggaggacgcgctggcggaggtcgccgacatcgacctctcccgcgagttcgtcgcccatgcgctgaaggtcagcctgcccacggcgaccgagctgcgcgacatcctgtcactcaccaacaagctcggccccgaagacgagctgaactgcggcgcctgcggttacccgacgtgtcgggagaaggccattgcggttcaccagggtctcgccgagccggagatgtgcctgccgtacctcatcgaccagctccagatcaacgtccagagactcagccggagcaaggacgagatcgaacgagcccgcgagctggccatgcgggcccagcagctcgccgacatgggccgactggcggccgacatcgcccacgagatcagcaaccccctgggcaacatcgtggttttcgcccagctcctgcgcgatacgatgcctgacgatgacgcgcggcgggaggatgtggcgacgatcatcgccgaggcgcttcactgccgcgaggtcatgtccagcctgcaggggttcgcccggcagcatgagccgcagtgggaacagacaggggtctccgacgtcgtggagcgggcggtggcggacatcgagccgaagctggccttcaccgaggtcgagctggagaagcgcttggaggccgacttgccgccgatcgtcgccgacccggcccagctcgcgcaggtcgtagtgaacgtcctgaccaacgcgatcgaggccatcgacggaccggggaaggtcgccattgagacacgtcgcgccgacgagacccacgccgaggtcatcgtgcgcgataccggccgcggaatcgagccggagcttctcccgcgcgtcttccagcccttcgtgacaaccaaggacacccgccgcggcgccggcctggggctggccgtcgcgcacgggatcatgcacgcccacggcggcgacatccgcatcgcgagccgcctcggcgcggggacgacggtcacgctcagtattccgctcgatctcgcgccctctcgtgcggagagcgccaaggtgctcgtcgtggacgacgaccccgacttcctcgagcagcatcgcctgatgctggcggggatggggtttgatgtgatcaccgccgagcgaagcgatgaagccctagaggtgagcggtcgcgagatccccgatgccttcgtgctggacctgatgatggagcggacggactccggggcgcgacttgcccgagccttgcgccgcgatccgcgcttccgtcgagcgccgatcgtcatgctgacctcggtggtcgatcagacgggcttcgagttcaaccggaaccccaagagagtcctggagtggatgaaggcggatgcgtggttcagcaagccggccccggtcgcggagctggcaaacacgatccggcgcctgctcgcgggcactcggcaggagcaggcggagggcgtgcccgtggtcgagccggccggtgaggccccctgatgggtgcgacgcagctcgacgccgatatcctggtcgtcgatgacgagctcggcatccgactcgcctgccagcgcgcgctggccaggctgggcgcccgggtgaagctggcggcgaccggcgacgaggcgatccggcagttgaccagccgcaacttcgatgtcgcgctcatcgacctcgtgatgcccaacctgagcgggatggaggtcctcgcccggatcgctgagtccgagatcgatgtggtaccgattgtcatcaccgcccacgccagcctggacacggccatcgaggcggtgaagcgcggcgccttcgactacctccccaagccgttcgtccccctggagctgacgacccgtgtcgagcgcgccctccgctggcagcggctgcgccaggaagccgggcgacgactgcttgagctcgacacggagaagagccgcctgcgcacgatcgtgaagagcctcgccgacggggtgatcatcgccaacgccgagggacaggtggtcctctgcaacccggccgcctgcgaggccctggggctcgccgatggcctccgcgagccgcggctgctcgaccaggtggtccgagatccacgcctcctgaacatggttcgcgcggtggctgccgacccgcaagcggacgaagcggcgtcgacaacggagttccggacgggggaccgcatctacatggcgcgcgccgtcccgatcgaggccagcgagggcgaggctctgggcacggcgacggtactgcgcgacgtgaccgagctgatgcggctcgaacgggcgaagctgcagttcatgtcgaaggtggcgcacgagctgaaggcgccgctggcggccatccagggcttcctcaacctggttctcggtgaacaggaactcacaccggagaagaggcgggagcttctcgagcgctcgcgggggcgtgtggcgagcatgatccagctcgtgctcgacctgctcgaactctcccgcgccgatgcgcttcccgcgcggaaggttgagccgctattggtgggcgagatcgtcgccgaggttgccgaggccagccgctcgatggccaagggcgccgaggtgagcctcgaggtcgacgtgccccccgactgcccgccggtccatgccgactgcgacgaccttacgcgcatggtcgcgaaccttgtgaacaacgcgatcaagtacaaccgtcccggcggtcgaaccatggtctcggcccggcgcgacggcgatcggctgcggatcgatgtctccgacacgggaatcggcatcccgcccgaggcgctgccccgactcggcgaggagttcttccgggtgctcaccccagagcggaagaacatcgtcgggaccggcctcggtctgtccctggtcaagcgaatgctggccgactgcgggggacggctggaggtcacgtcgaaggtcagcgagggcagcacattctcgctactcctcccccttggcccgccgaggtaggacccctcgttccccttgtgggggtgctggctcacgcctcaaacccggggtctgggtgcgaccacaaacggcaagtcaagtcgcttgtcaggccagaggggtatgtccacccgcacccgcaggcgccattcgcagttcaccagttgcccgctgaagctcaccggcccctcggccggcaccgtcaccgtgagggggtacgtgatcggcgcgccggccaagagtggcccctcgtggatgagccgctcctcggacacccacttccgctcctcgttaccgcggccgaagatgcggtagccgacctggcatctcactccccggcaacggatctcctgctcggtctgcagcgacacgttgagctgcgcggtcgagcccaccggcacgacgggcatcccctgccggtccgagtcgccggtctgaagtgtcgcgcacaacggcccggacgtggctgcgctcgcctcggcgggcgcccggtcggcctcggcccgagatgcgggcgaccactccggtcgagtctcggccggcgccccctcgatcaccggcacgacccagagccgggccttcttcttgatatccggacagatgccgggcaccggcacccccatcgagaccgtccactggatggtgttgtaggcaccgcggtacgatggcaggctcgttgggggcacgggcagcgacccgcggaggaccacagcctggccgggcgccagggcttggcccgggaagacctgggactgctcaagcagcgtgttgcggtggaccgactggctcttcccactgccgtggaccgctctctcctcgcaccacagcctggtccgcgcagtaccgagggtcacggggcgcttggcccgaatggtcaccccccaggtcaacgtctgccccaggtccacggaggtcggcgtcgggtcccaggtgacctcatagctgatggccgccaggtgtgcccgcgcggcgaacacacctcccaccaccagacacgcgatcgcgatcaccgcgacaactggcccgccggcccgggccaccatcaccacgagcaagatgccgcccgcgatgatgcccacccagttccgctcgccggggagcctcccccagatccgccaacgcggacggaaccagggcgcctcccgcgggggcgctggccgagccgtaacagtctccccgggggccggcgcgtaagtctgcgcgggctcaaatgcgggcggcgcgggtggcggggccgccggcggcggcggagggggaaccggagccggaaggcggggctccggaggtaacgggacaggacggaccgggggcggcggcgcttgccgggcggcggccacctcaggcggctggctcgccagcggcttgaagcaccgatggcagatcgtgacgatctccgacttctggttctccgccccgcagtgcgggcagaggaccgttcgtgcctcaccgtacatgagaacacacctgtcgtggaggtcgggcggccatgggccggagcgcccgcggcgcacgcccgagcagtgccacagcccgtgcaacgaacatgccaggagtcggtgtgcccgctagacctgccccatttggtcgcacccggtcaagttcgcctcgggcgtctcggcgatcactccagccgtcggtagtactcctccactgcctcgtagtccaccgtcggatcggacttcatgccgagacgctcgtacagcccgcggcgagcgtgcatgtccgcgagcagtaccgcgcgggcgtgaacggcgacctcctgcgcgacctccagcggcaccaccaccacgccgtcgtcatcgcagccgaccatgtcccccggccggacctgaacgcctccgcagccgatgcgcgtctcgacctccaccacctcaatgcggccggggatgatagtgcgtccacgggcgcgggcgcagatcggcgtgcgctgaagggccagctccgctgtgtcgcgggcatacccgtcggtgacgatgccgacggcgccatcggccactacacccaggctgttgcacgagccccagaagcctacctcgcccgccccgccggtgtcggtcacgagcacatgcccggggcctatcatgcccccgaagtcgacgttcccgacctccctgaaccagagcccgtgggcgttgacgatgtcctccgtcgtcgtaagcggccacatcggtcggttcgccggcacgcaccggatggtgaaggccacgccccagaacttcatgcccagccagagcgggcgaatctccggcgacacgaggccgatgccgaagtagccgatgccatcgagggcatcgcagacatcgaccacgcgcaggggttcatacaaccgcctgagcacgaacgggtccgccgtaggctggcgggtcggggatcgcggcttggtcatggtgactcctcctgtatcgagctattccccgtggcctgagggcagttcctccccgcagagacgaaggcgggcgtcccggaaagggtgcccgccttcgctcttcgacccgcgccggcacgcggcggccgctcagcccggtcacccgcctacctcgcagccctcatcgggagcaggcgccttctcggccgcgtctctggtgccttcagggcgagcagcgatggcgatgccctgccggatgccaaccagccacttcttggccagttggtccggtgtcccgccggctgccttcgcgccggtgagcgttgcgaccgcgaccaccttcccgctcaccctgaccgcccagcctcccgccacctgcttgcggtcgatctcattcggtttgaccggctgcctcagccacttcctcagcacttgccccgctgcctcggcgcgctcattcggcgactggtcccccgaggaggcccggatcagcatcgccgatcgctcgttgatgagaacccgggcgaaggtcttcccatcccgcttgacctgctcggtgacgatcctcgttttgatctttcgcggcggctgcccggcgatcgcctcttcctccgtgccgctctgcagttccccctcgatggccgcagcgacggcggccttgaggtcgtcgtgggtccaccaaaagccgaccggctgacgcagcgccaccgtcttcgtcctgccgccggtctcgaacttcacgagcggcgatccgtcgacttcgatgaccatgcaatcgtacccgctccccttccactgcttgctcccctcgccttggtcgccgaagtcgacgatccccaagtcaacccgaccggggtactccgccttaaagctcttgaggagctctatggtcggctcttggcagccgctgctgacattgacgtaggccaggatcttcaccggccgcggagcggccggcccgccgccctccttggccggctcgccgcgacacccgaccaggacggcgaggagaagcagcgagacgactacggcccatgccgtcttgggcctgttgcgcatgacgcacctctcacttgaagctgttgatcggctccccggcgatgaactccacatgcccgtccaggtactgcactagaatcccggctgccttgctccgctgatggggccatacggggcacttcttccggaaccagtcgctcatgagccaggagtcgccgtcactgctctcggagagcagccgggaggtcatgctcttcgcccagggatcgagcaaggtccatgagtagtacttgtaggtgattcggtaggcggcccagtttgcgtcggagtcgatgacggagtccggtggcccctggtactgcgtgctttgggcccccgcctccagcgccttggcgcttgggcagtagaacagattgcggttgcggacgtagggccacagcccgttacacagcatcggatgcgggttgcccatgtagctgtcgaaggggaactgctcgtcatagtcctgcgcgtacacgtgcaggcccagccccagctgcctcagctggctgctgcaggaggtctccctggccttctctcgcgcccgtgcgaagaccgggaacaagatcgctgccaggatcgcgatgatggcgatcaccaccaagagctcgatcagggtgaatcccgattcgtgtctcattgccggttaccccctctatctgctaaacacatatagctccctgagtgtcgctgacagatgtggagctgcttgggagcaagcagggagttacgggggagcgcccgccgcgcaacagcagggcttgacaggctcacgagagtgtggtatatgctataagcatatagatggtgcgaacgatggcgccgcgcggtcactgcagacgacatggccagcagttcggcccctgctcctgttcgctggggaagctgtcgcggctggtcgagcccgcgatcctcttcctgttgggccgccagaacactgcctacgggtacgagctgcttcagcagctccccgaggtcgcgttgaccgactcggagatcgatgttggtgcggtgtaccgagtcctgcacacgctggagcaggcgggctgcgtcacctctcactgggagcccggtccgggcggccctgaccgtcgagtctatgagatcaccccggtcggccgcgagcacctccgggattgggcgaccgtcctcgaacgccggggtcaggagatggttcgtttcgcgggggcgtgcaaggagctgtaggggaggtgctcgcccctgcgaggcgtttcgtcgaggtggtatatgcaaatagcatctagtaaggaggcagggaatgcgagtcgcggttgccgtggacggaacggacgtggcctggcacctggggcattgcgagggctacctcatcgcggatgttgcagacgggcaagtggtggagccgaggcgggtcgagaggcccaacacacagacgtgcggcacgccggccctgctgagggctcacggcgtggagtgcgtggtggcgggcggagtaggctacaaggcagcccagcgctgcgccgacgcggggatcggcgtggtgacgggcgtcgagggtgacgccattgaggcgctcgcccgcctcgcagcaggcactatcacacccggcgacaaccgctgtgcccaagggggcacggcctgcgcggagctgggcgaggaacggtgtccaggccacaacgagagacacacatgcacggagcacggagaggagacgaagacatgagacgacgcaacatgttccacttgaccggcctgcccggctggatgcggggggagttcgctcccagggccggagggccagggccgtgcgcgcagttcctcatgacaggccgatggcctaccccagggatggcggccgcatcgcggcccacgcaggaggccacggcccaggggccagggaccagcgctgatgacctccccgccctgcaggatgagctggccggcctgaaggcgcggctggccgaactggaggagcgcctcctggggcctcgcgcgcagcagccatcgcaggggtgaccggtccgacggcgccggcgcgctcgcagggggcgagaagagcagggcgttacgctgctaccggtcctgccctctctcctcgcccacccgcatccccacatcgatgaactgcccaccgagggtctgccggcagtggacggcgagcgtgttctcgcccgcgcgcagggccttccgcagcgcctcagtgcactcgcagttgacgtagtccgtggtataggccgacagggcggcaaccttctggccgttgatgtacacctcggcatcctcgtcgtgatggatgctcagcgcggcgaagcggaagtcgaccttgtcgagccggaacgtccggcggatccagatgctgccctcgccctgccaggtcgtgccgacgaccgcccccggcgtgccctcggtgccgaaaccacccttgccgacctgccacttgctgtcatcgaagttgggcttgagccagtcctgcccgggctcggttgtcgtgtagcgccagtcctgcggcgcctccttcgaggtgggaacgaccgtcgaccaggtgatgtgcaggatgcgtggcggctgggtctcgtaggccgcggggcgagcgttgatcgccttcaccagagcggggtcgtacttctgctgccggtcgtagaagtagatgccgttctgctcctgttcgatgtcggtgagctgggtatagcagaagccgcacatgttcgggttgtcgagcagcacatcggtgaggcccttgcagcgttccaggtaccccttcaggtccgtctcgccgtagccccagccctgaccgacatcgcggtcggtcttcagatggatgccgccgtactcgctgacgaagaacggctgtccgcggtacgcgctccgcgggtcggcgaggttgttgttccaagggtcagtgccggtgagcgcgaagttggcgaaccgcgccgcgaaggaggtggggttctggtcgtagtcgtggcagtcgtagacgtcggtgtcggggtagaggtgaacatagccgctcgtgtcgatgaagggccgcgtggggtccatcgtctgcgtcgctgccagagcagcctggaacgccgccgtgacctctccgccaccggtctcgttgagcgggcaccaaccgatgaccgaggggtggttgcggtcccggcggaggaccgtgcgccactcctcgagtgcgaagccggccgcctcggcattgccgaagttcaggccccagctcgggtactcaccccacaccacgtagccgagcttgtccgcccagtagaggaggcggggctcgaagaccttctggtgcaagcgcgcgccgttgaagccggccgccatcgaaagctcgatgtcgtgcttgagcgcgtcatcggtgggggcggtgtagatgccgtcggggtagaagccctggtcgaggacgagccgctggaagatgggcttgtcgttgatcaggaagcggttgccctcgatcgtgatcttccgcatcccgaagtaggagtggacggcatcgacgaccttaccctctcgcacgacctcgacagtgagatcgtagaggaacggcttgccgggccaccagggggtgacctgtttcagcttgaccgcgcccgatgccacgcgccacgcacccgggaaggcatcctcgcccattggcttgccgtccgctgtcgcgcggaggcagacggtgacacccttgctcgggccatcgagccagccctggaagagcaccttgccgccgtcaagatccggcgtcagcacgaactcacggaggtaggtgtcgccgacggattccagccacaccgtctgccagatgcccgtcgtccgcgtgtagacgcaaccctcgctgcggccgaagctctgcttgccggtcgcctgcagaccagagtcggtcttgtcatagcagtggacgacgacctcgttctcgtcatcggcgatgaggtcggtcacctccagcgcgaagggcgagtggccaccgcgatgctcgccggcgagcttgccgttgacccacactcgcgcatgccagtccaccgccccgaaatggagcagcaggcgctcgctgcgcatcgcggggggcacggtgaactgccggcggtaccacgtgtggatcatgtagtccgtgttggcgatgccggagagcttcgattccggcgggaagggcacgatgatcctctgcgccaggtcgtgtcccgtggtcagcccacgctgctcgccatcgcccttcccatcgacctcaaactgccactcgccgttcaggttgagccagtcggcgcgctggaagtcggggcgaggatgctcggggcggggaaggcccgacgccggctgagccgccgccgctaccacgagcacgacgaggcaggcaagacaaagtgcataggttgtcacaggccgctccttcaagtgggcagtgccgcgagccgtgccgttcttctggcctctggcttgtggcttctggcttctgacccttgatccctgatccctgcccactgccgtcctcgtattcccctcgcaaggtcctggccctcctgtcctcgaaacagccctggtatcccaccagtgcgaccgcaccggaaaggcccaatgctccatgcctgcgcagaccgtcctgcctcgttggcgtggcttcaacctcctggagatgttcacgacgaagagccgggaaccgttccgcgaggatgacttccgctggatcgccgactgggggttcgacttcgttcgcctgccgatgtgctacacgctgtggatcgaaggcgatgacccattccacatccacgagccttcgttcgcccgcgtcgatcaggccatcgagtggggccggaagtacggcgtccacgtgtgcctgagcttccaccgcgctccgggcttctcggtgaacgccgaacgcagagagccgttcagcctgtggcgagaccaggccgctctggatgccttctgcctgcactggacgtacttcgcccgacgctaccagggcatctcctcggagcacctcagcttcaacctggtgaacgagcccgaatcgccctccgacgagaagatgacccgcggagaccatgagcaggtggtgcggactgccgtgggcgccatccgcgaggtggacccgtaccggctcatcatcgcggacggggtctcctgggggaacgacccctgccccgagctggccgacctcggcatcgtccagagctgccgcgcgtacgtcccgatgggcgtgagccactaccgggccagttgggccggcggcgagaggttccccgtgccgacctggcccggcgccctgcacggcgacaagccgttcgaccggcacgccctcgaagcgcactacgcccgctgggccgacctggcccggcagggagtcggcgtgcactgcggcgagggcggcgccttcaaccgcacgccgcacgacgtcttcctgccctggttccgcgacgtgctcgagatcctcacaggccatgggattgggtacgccctgtggaacttccgcgggtcgtttgggatccttgattcaggtaggcaagacgtagcctacgagcactgccacgggcatcagctcgaccgtgagctacttgagctgctccaggagttctgaacgctgttggcgctcgctgggaggcccagtaacgaacgccgcgcggaggccaactatgcaggtcgtcatccctggactcaccgcgtgcctatgcttggtggcgagtggcacatgcttcgccggaggtgaggtcatgggctactggcccttcgacggcagcctgaacgacgcgtccggcgccgggaggcatggaaaggcggagggcccgaagttcgtcgagggcaggaaggggcaggcgctcgcggcggaatggaagccggttgaggtggcgagtgcccccgagctgcagctttcgcccgggctcatggtcgattgctgggtgtacttcgaccagaagcccgaggggtgggagcagatcgtctacagggagaaggagtaccagcttcgcgtcgacgacgggcgcgagggcgggcggttctccttcttcgtgtacctgaacggttgggagccgagggtatcggggccggtgcctgaggccggtcggtggcaccacttggtcgcgcagtggacgggcaccacgctcagcctcacggttgatggacagaagtcgtcgacaccgcggtcgggggcgccggtgccgacggaggacccgttgcgcattggcggcatgaagggccgccttgacgagctgacgatctcgaacccgggcttggcgcagcgggagcgactcgcggaggccagccgagccatcccggacgcggagcgtctgcggcaggcgtccttcggccgcgaggccggctggaccggctggcgggcggacctcggggccacagtgtcggtcgcggacagcgcggtgaaggcgggcttcccgaccccggcggcgctgatcgtcaacccgggccttgccatcgacgtcaaccagcgtggttgcgtgtcgctggagcttgagagcaccacagccaagagcggcactctcgtcttcctgaccgaccggggccagggtgttgtgccgttcacggtgtggggtggcggacgggcgagcatcgtggacctgagcccgctgccggcgtggagcggcatgctccgcgttctgggactggcgttcccggagaacggaccgcacgatgtggccgtgcgaagcctctgggtctccgagcggccggaggggcggccgttcctctacgtcaggaaccttgcacccggccgcgccatcgtgcgggcgggccgggaggagaagatcatcgccatcgtgaggaacctaggcgcggacgcgaggaacgtgtgcgcccagctcgatcccgccaggctcgcgcgggtcgtcggcccgaccgcgcaggccatcccgagccttgagcacgacggcacggcgcggttcgagtggcgcctccgggcggatgctcctgccaccgggaccgcccatgtggccatctccgctgacggctgccccgaggcgagggccacgctccacgtggacctccggccctcgcagaatctgcccaaggccgactatgtgccgccgcccgtgccggcgaagacgccgtacctgacgctggtgcactactgcccgctctggaaggtgggcacgcattacgggtggggcaagatcgagccgtggccggagcggaggccggccatcggctggtacgacgagggcacccccgaggtcgccgactggcacatcaagtacgcgctcgagcacggcatccaggggttcatctactgctggtaccgcgcggacttcagcccggagatccaccagtccctcgggcatgccatccacgacgggatgctcaaggcccggtacctcgaccgcttcaagttctgcataatgtgggagaacgggtgcgctctcggcgtgaagtcgcgggaggacatgatgcagaacctgctgccctactggatcaggagctacttcaagcacccttcgtacgtgaggatcgacaacaagccggtgctcttcgtctggcagccggggcgagtctcgccggagctgggcgggtccgaggcgacgcggaaggtcctcgatgagatgcgcgaagcctgcaagcaggagggcttcgacgggctgtacatcatcggctgcgtcggaggcgccgacgagcaccttctccggcagatggcggccgaaggatgggacgccagctcggcctacggcatcggcgggccggtgaaggcggaacccgggcgcgatgtcgagggcatcgcgaccacgccctacggcccctggctcgatgcgatgaaggaggcgtggctgggcaagaagcggatcggcgctctgccggacatcgtcgatgtcatgatgggctgggacccgcgcccctggcacgagaagaacaccagctcctatgtggccggcgcccaggccgaggccttccgtgcggcgtgtgtggaagcgaggagggtcgtcgatgcgacgcccggcaacgggctcgacaagcgcgtcgtcgtgttcgacaactgggacgagttcggcgaagggcattaccttgagccgacttcggggtttgggttcagctttgtggatgccatccgggacgtcttctgcgagaagacggggccgcacgtagatatcacgccggaggacgtcggcctcgagccgcccgagcacgtctatctgaagcagaaggagatcctgggcgagggtccgggccgggagcggaagatcaccgacaaccttgtcgcgtggtgggcgttcgaggaggacgacgacacctttgcgcaggattcctcaagctgcggcttcaccgcgatgaagagcggcttcgtgtccacgcagggcgtcaaggggaaggggtttctctgccagggcggctcggtgagctgcatgccgaacgacttcttcttctcgcgcaacggcatcaccgtggacctgtggttcaagaccgatgtggcggaccagtccgaccactggatggtcaacacgatcggcgccgcgaacaccggctaccggttgggcctggttgacggcaagctcgtctggcaggtcccccagaaggagtggagccacctcctcgcctgccccgacaaggcgccgctgggccagtggacccacgtggccgcgacctacgacaaccgcaccatgcgtctctacctcaacggggaggagaaggcatctctggaacgcggcggcgcgatcatcccctccggcgccatgatctgcctcggcagctacgggccgggcaacgcggccgcggcgttcagcggggtgctggacgaggtgcgcatctacaaccgcgccctcacggcggacgagatccgcgaacgcgcgcacccgtgacgccgtttgccatgccgttcgattcggtcaagccgggccgcgaggcccggcttgaccgaatgagacggcgacgtcaacggccctccgctcgcccgtaccgtaccaccacgctgctccccttcttcggcagccgcagctcccactcgttcatcagctggcggccggccatcttcttggtcgtcgtcttccgcgcgtcgtcgatggactcgaccgagtacgtctgttcggccttcagcccccgcaggctaacggacagcgccgggtagttgctctgggcccggcggaaggccagcacgaggccggcgtcgaggtcggcgcggtggaactggtaggcggcccagtggtccggggtcgtcgtgcagcttgtcaacgggtagaagtcgccataccagtaggcctggtcggccttcacctctgcgatcgtcgccttcgcgagctccatggggaactcggggttcaggtagtcccactgcgcgatggccccgccggtcgcggaactgcggaagtcgtacggctcgggcgtccagccgcacgccgtatgcagagggatgtactggctaagccccgcggtctgcccctggttccagtcggggtggccgggagagcagctcgtgtcactccgccagagcggcaccgagcgtgagacggtctccaggtcgatccgccgcccgccgctggcgcagttgtcgatcagcagccccgggtgcttcgcccggagctcgtcccacatctcgtagtggccctcgacgtagcgaatctcgatcatcccctggcggtcgggcgcgtcgttcgcgcgccagaaggagagagggtcgatgttgaagtcgttccggtagatgtcgatcccgaactcctcgatctgccgggacagaagatcggtcagccatcgccgggccgccggatcgctgagcttgaacaaccccccctgctcgcccccgaacacgaactccgggtgctcgcgcgcgatctgcgaaccggcggcgacgcgctccggctcgtaccacagcacgaacttcagccccagcttgtggcaggcctcgccgaccggcttcaggccgttcgggaactccttggccttcgggtaccagttcccgacgccgttcgggaagccgccctcgaaccacgcggcgtcgagccagtgcgcatcgaagccggcctccttcgcgaaccgcgcggcggcgatctgcccggcctcggtcgcccactccgatcgcgtccagctgtaccggtcgaagcactgggagaccaccggcagccgcgccgggcgcccgttcagcttcggcacatagctgaagagaagcagccgacgcaggcggttgtgggccacctgtcggtcacccttccagggcatgagcagaatgcgggggctgcggatgcgctcgcccgggtgcagcaggagatgcgtcagctccatgccggcgcgcaggcgcgtcgggcccgcgcccgagcggtcgagcgactccgcccactgcccggaccagccaatgcccacgatgagccctccgtcgtggtactgcaggttgcagaacgggaaggcgccgttcgacggccgcccgccacctggcgccaaatggatgctcttggcgacgtcgaggggggtgtcgaacgggacaaacgattgctcgccgcacacatcgcccgtcagcccatggagcactgccgcgcgctttgagttgcctgtgcggacctggacatcgagggcctgaacatccgcgagcatgggcgtatcgccggcaccgcggttctcaaagtgcagcacccagtcgacggccgggtaacgcttgaagcagccgacggtggctgtcacgtgcagcccggtgttctcgtccgcccatgcgatgtcgtactcgacccggtcgggcaggtcccgggaggtaaccgttcgcttccacgtaacgagtagctcggcagacggcttgcccccataggtgaacgagaacggagggctcgccggtgagagcaggggatcgggctggttctcgtccaggtagcggacgctgtcgtcctgcatcacgagttgcgcgtcggcccagtccgactggtcgtaggccgggccgtcggccgtcgtaccgaccttgaggaccagctctcgggaaccgttgggaacctccacgctcaccggcaccggctcctgaccgcctcggagcgtaggcgtccggaggacctccttgccatccacctcgacgcagaactccacactcccgcgcacgccctgggtgtcgtagttggtgtcgatgccgacccaggccttgaaggccttggcgcccggcgggagggtcaccgcgatctcgctgttcgcatgggtaccgagcccgcgcgggaacccctgctgcccgatcttgatcggggtctccatgcacgattcccggaaccgcagcacattgtggtcttgcctgcgcacctggagcggaatgtggaccggcgcgcccgcaggctccgaaccggtgaacgcggccagcgcccaggcgtgggcctcttgcacctccaccacactcgccatgaccgcatcgttcggtgcgtcgagagggatgtcggtgtcctccatcgcgtgagctccagtctgcatgagcagcatcaccagccatccgacagagaacccgctcatctgtcacctgactccacacaaggtagtcagcggtcgttgggcactgtcccgcctgccgcgtcgtctgcggcaggcgcgcatcgtccccttctctgtttcacgtgaaacacctcgccggaggtcccttcgccctccccgtcgaacgccgggtcgagttgctgaacctcacccagacgaggcacgccatgccgacgatcagaacgctccttctcaccggcgccaacaatcacgactggacgatgtccgcgcccttctgccgcgacctcctcgcggcgagcggtcggtttgccgtcaccctcaccgaggacccctcctcggctctggcggatgccaaggcccttagcgagtacgagtttcttttcggcgactacaacggcccggagtggaccgagcccgccaaggccaacttcgaagccgccgtccgcaccggcaccgacctggtggtcatgcacgctgccgacaacgccttcccgggctgggtggagtacgagaagatggtgggcctgatgtggcgcgaaggcgctggccacggcagcttccacgagttcccggtgaccatccgcgaccgcgagcacccgatcacccagggcctcgctgacttccgccagtgggatgagctctatcaccggctggtccacatgcacggagtgccctaccacgtgctggcgaccgcgtactccgatcccgcgaccggcggcacggggaacgacgagccggtcatggtgaccacccggtacggcgaggggcgcatcttccacatggtcctcggccacgtctggcccggcaacccggacatgcgcgcctttgagagcgagggtttccagcaagggctgctccggggatgcgagtgggcggcgcgcgggaccgtcgcgtaggcgagtcactccgggactcgcgcagcacgccgccccggaatgccctttgactcacccgcctatcagtgggtatactcaccttggagagtgggccgggcggccgctctcgaaccccgcgcaagcggaggacgggagaggaaagtccgaactccacagggcagggcgctggctaacggccaggaggggtgaccctacggaaagtgccacagaaacacaccgccgggccgctgacatgagcttaggcgcggacgcaggcggcgttaggccgcaacatcccgacgcgccggccattgcggagcccggtaagggtgaaatggtgcggtaagagcgcaccagcggctcggtgacgggccggctgggtaaaccccgcccggagcaagctcaaatagggtggcatcgcggtggcccgccgcgccaccgggtagagcgcaggaccccgcttcggcggggccgggtcccgcacgcgcggggctcagacaaatggccgccatcccgctgctgcgggacacagaattcggcttataggcccactctccactggttacaagcccgttttcggggtccccaacaccccctgggcagtaaccgggcctagttgcagaattacaggcccccttttcgcagtccaccggcacgaccgacggctctgtaacttgcccgtccgggcagggagcggcacatcccgaagggagtgccgcaacatggagcttgcacctgcccacgaggagttcctggcgtacctggacttggaggccaaccgcagcccccagactgtcaccgcctacgcctccgacttccggcagttccttctgtgcctcaccgagacggaccgcgaacccgtgggggaggccatcgaccggcagaccatccggcagtatgttgcgtggctccggcggcgaggtctcagcgtgaccagcatctgtcggcgcctcgcgtcccttcggtccttctggcggttcctcggagacaacgggtacaccgaccgcgatccgttcgtcagggtgtcgatcccgaagcgcgcgaggtcgctgccagtcgccctctccgccccggaggcccaggcccttctgcaggcggctgagcggcagccgtccatctacagggccttccgcgaccgggccgcgctgagcgtgctcttgttcacgggtcttcgtcgcgccgaactccttgcgctccgcctgcccgacgtggacttgggcgagggcacgctccgcatcgagcacggtaagggggacaagacccgcctcgtccccttgggcgagcggcccctgtcggcgttgcgcgactggcttgacctgcgtccgggctgcgaccatgacttcctctttctgtcgagtgatcgacgcccgctcggacgccgggcactcatgggcctactgcggaaggcgttgcgccgcgccgggatcgaccggcccggcgtcgtcctacacagcctgcgccacactgccgcgaccttgctcttgcagggcgggtgtgacttggcctcggtccagcgcattctcggccatagcagcttgaacacgactggcgtctacttgcaggtcacaatgcacgacctccgccgtgccgtcgcccggcacccgctggccgttcccggagaggaggttgaccgcccgccgtttgcgctccgcgttgctgtgtaggtagatgccggtggtagcgatggacccgtgccccatcagcgcctggatggttgggaggtctacgccctcggtgctgaggcgggtcccgaaactgtgcctcagcgagtgcaacgtgtaaccccggtcgccgaggccagcccgtctgcaccatcgccggaacatccggtcgatcacctttgcggtcatcggcacgccccggcgggtgacgaacagcctcggcgagtccaccgcggggcgttcggggaggtaagcgtcaaccgcatcgcggacagactcgctcacaggcacccctcggctgtggccgcccttgccggtcaccacaacctcggggctgcgttgtacgaagggcttggcggacaggttcacggcctcgcccctccgtagccccatgcccgctaacaccgcgaaaacggcggcctccaacggtccgcgcgttgcgcgacgaagagctaccacctcctccgcctccgggacagccttgcccaccgtccgaggcttcctcgggcggatgcccttcgtcacggggttccttacgaccgtggggtcgggaagctctagcaagtagttgaagagcgaggaaatggcgtcgagtcgccggcgtgtggtggtggccgcccactcggaccgcgacgcgatgaacgccctcacatgaacggaggtcacggcgccgggttcggtgaccccgcattcgtcggcgaggaaggtcccgaacaggcggaggtcggaggcgtagcttaccttcgtgctcggcgcgaggcgagggctgagccggagaaactcctcgcagccctcgacccaggggagtcggacctctgaggggacctgtctcgacgtcggggtgcttgccatcgccgtttcggctgcgcggggaggccttcggaggcgaggccggcgatagcctgttgccgagggcctccccgcgcgttccttcacagcgaggatagcactactccacgcggggcacaacatccgcgggccaatcgggtactcacgggttccgcgcccaaagccgtgagtgagtggcgctcacccctttgccttctggctctccgcgcgcctgagctggcgcagctcctcaaacccctccttccgcgcggttctcgtggcctcgtcccttactgcgcgcttgcggtctttgaccctctggcggcacgtgtcgctgcacgtttggcccagcccgccttgagtcgtcgtcacaaacaggcgtccgcagatcttcctactcttggtatcggccgggtggaggggagccaagcaccttgccacacgctcgttgcagtgttcgtagaccacctccgcgaggaactgggccgccaggtagagcgtcgagtggaacagagagtcgctgcggggccatccgcctccggccacttggttctcgcgtccaggatacgcctcgcgctcatgggtttcggggttgtagcagttgaactggaggacgggttgttggcgaaggaggccattccacacctccacctcctcgggcgtcagccagaggccttttctcttcctgcttcccttcctcttggcgtccgcgtactgcgccgcgatcttctgtagcacccggaccgcttgcgcggcctcctccgcggtctccggcgtcgtgtgctcggggatacacaggttcacggcgtcaccccctcggtgaaggcgacgcactctcaaggtctcccggccccgcttctccttgcgctcgcctggctgggtgaccatgttcaggatgccctcaaggctgaggtggtagagggacgtgcccggcttggccctccggaagggtaggtccaccgtctcctctcccgccgacgagagtgaggcccagacctgctcccacggatcgtgctgcagcgcttgtgccttgctccgctcaccctgagtgcgtctcatgccgaagtgtcccccgacactaggtgtagggccatcgcctgtaccatcgggtggtcgagcggccgggcggccaaggctgggtgtgggcttcgcgccacctcgatcagcccgacgcactgcgcgtcttcgcgtcggccgcgcgtgccgggtgagtcgacggtcagccagctacggccggcggcgcgcacgtgccgcaccgggtctgcgttcgcacgttggcgggtgaggtcggcggcctcggtgatggtcttgggtcgcgccatcccaacctctcccggcaaccgacccacggtacccacaccctagctttccagccgtggtcgccgccctcctgcaggacatgcccgcaatggaggaaccgaccgccgcacgtgcgaactgccttcctcggtgcgtcggaagtgcggcgatagtgcggagtcgtgtctgtgcagtaccgcccgagcggctggctggaggcctctgcacccgcgaggggcaggggaggggaggggataagtatgctgtcggcggcggtcctctgcctgtgggcgaagcggtccgagaagaacggcaccgtccatccgctggcgtgtcacctgttggatgctgcgcacgtggccctggagttgtgggacgcggctctcgctgcagggctgagagcgcacttcgcgcaggccttcggcagcgatgaggactgcgccagggcatggctggcgtgtctcgctgggctgcatgacctgggcaaggcgttgcccggctcccaagggcgagatcccgccacgcctctcgccttggcagaggcgcgatccccaccaagttccatgccggcacctcgcggtcacgcgacataagcagttcccccaccagcgcagtgcggccacaggtggctggcgtaacccgaacatgccgaggtgagcaagccatgaaccaggtatccgggacctacaacttgctcgtggaggagtgggttcccgttctaaggaccaacgggcagccatgtcgcgtggggatcagggcggcgctgacggaggcggggagtatccgccagatcgccgcgtcgaaccccatggacaacgtggccatcttgcgcttcttgctcgcggtgctccagtggtgcaagccggaacggagcgaggaggagcggcgcgaacccgaggacgccgaggggataccaggggactggctcgccaggttggatggagtcaggaccgggttcgacttgcttggcgaggacaccgggttcttccaggaccagacggcatgggccgaggtcgagcagaaggagaaggccaagaagggcaagagcgcagatgatgagggcggcgggttccgccccgctaccgatctcttgcaggaactacccagcggaacgacagtggcccactttcgtcacactcgcgatgcccgagacgcgctgtgcccggcctgctgcgcagtgggcttggtgcggctctccgccttcgctcccgcaagtgctcacgggacgcaccagcagaagccctctggcctcaatggagcaaggcccgtgtatgccatcgcctcgggcggctcgctccttgccgacttggcggcgaactggccgctgccatccgtcgtagccgcaagtgacgccccttggtgggaagaccccgaggaaccaacggacaaggacaccatcgggccgcagcgggcattcacgtggcagccacgtcgcgcttggcttgagaggccgcgggacgatcagacggcgggcatctgctcagcttgcggcgacaaagatcggcttgtccgccggatcgccctgctccctggctggaagcggccgttcgggaaggggccgtggcccgctgacccccacctcctgagcgttcaccggccggccaccaggagcaagccgccgggcgccgaccccgttagcttccccggccccgcacaaccagcgtccgtcctcgcacggtcatggcggaggccctacctgggtgtgctgcaacgcaaggctgctgcgtgcgcaccggcgcagatggccgccgtgacctgcgccgggccggcagcgaacaaggccctctaccaggacgccgctgccctctcggcgcccccggttccccccggtgtcgcgcaggacgcggcggagactctccagcggctggccggtgcgatgggccagctgcgagacgttctccgccagagcacgcccaaccccaagcgccaacacccgaaccgcatggcggccctggacgcccagtctgcatcgctcgaagcactcctgcgcgagcagttcgatcactggctgaggagcgcgacgacgaaggaggaggccggtatcggccaccgactggtaggccagttgctgcctgttgtcagagcggcagtcgaggcggccacccccggctcgccccttcgccgtcaggaggcgctccgccgcgcccgcgcggcgctgggcgacgcgctgaagacgctgtccccagcgcccgaaagccccgacgccgacgaagcaagggaggccgagcatgagtcgactgaggagttcatcggcaagctggaagacctgaaggaaggcgagcgctcgcggctgcggcggctcgcggggcagcccctcgacgagacgcttccgggcttcgacctgttcactggtctgtggtggccgctgcgcgagaggaacccgcaagcgccccgacgcgagacaagctggctggtagctaggctctacggggcgttcccagtgccccatgttcggcgagacggggcggcacgggccctggcgcaggtcctgggcacgtgtgaacgtaagccacgcgaggagaatgctcagcgccgcttccgagcgcggttcgacgcgctcctgtgctcgcccttgcctgccctggagccgcacttgcactgggcgctgtccgtcgtggcggatgccgtcgagaggaggacatgcaccggccttgactgggcgcagttgctcgacgatctctccatctgggaccgcggcggcgagcaccgccgcaagcgcgacatccgcgatatctgggccgaggactacttgaacgctgccgagccacccgaagggaggagctgaccatgctgatcgagatgcacatgatccagaaccacagtccgtcgaacctgaaccgtgatgacctgggcgctccgaagacttgccttttcggcggcgtcacccgcgcccgcatctccagccagtgcctgaagcgcagcatccgcagccccggcaatcccgacgacatccacaaccgacaggctgggttgttcgcgacggggatggccgggcacatcggcacgaggaccaagttcttcccgtggttggtcgggcaggcgttgctcgactcgccggtccccccggaggagcatcggcgcatcgtgcttgccgcgcagcggatcgcgcagagcagcgagaaggaggagaaggcgaagcggggtgcgcgcgacacggacggcaggccgcgaaccccacagctgatccacctcggcccaggacacgccaggttcttcgttgccaagctggctgaactccgcgagcagcgcaaggagcagtatgagtacttcctacaccctgaagtcggcttcaaggagatggtgcgccagcaccctgacgtgtcggtgctcgacgagaaggagcagaacaggatcgtgaaggcgagttgggtcgtcgcgaagtgccggatggccgacctgctcaaggcccgtgaaggagaggaggctgagcccgaacctcccatggaggacgatcagccgggggacgcccacgccgccctagtcgctcagcgtctcgcggaactccgtctctctgacccggaccgcctcaaggccctggccaaggctcccagcaagggcgagaggggacagctcaaggacagtgccccagacagacccaagaagatggaggacttctacgcggccctcaagatacccggtctctctgacgcagtggacattgcgctattcgggcgcatgacgacctccgacgccttcgaggacgtcgaggccgccatgcaggttgcgcacgcgatctccacccatgcagtcgtgaacgaggtggactacttcaccgctgtagacgacctggggagagggccgcaggcagggcacctgggcgagacgcagtacaactccgcctgcttctacaagtacttctgcctggactgggagcagctcgtctccaacctcgccgggccgcagccggaccccaaggaggaccccaaggcccatgcggcgtggacgagagaagccaagccgaacgctgagaagctcgccgcctgcgccctcggtcacttcctgcgcgccgcggcgctgacgacccctagcggcaaacagaacagcttcgcctcccactgcgacgcttgcggcatcctcgtcgagatcaggaagacgaggacgcccaccagctacgccaacgcgttcgccgagccggtcgaacggatcgggaagccggacgacgacgcgccggatgagaagagcatcgagggccgcagtgttgcgtgtctggcggaccacgtgcacgcgattggcagaacctacggcctcgactcgacgctgctctggtacagcccgaagctgtggcggttccctctccagtactgggagcgggaggagggtgggaagaagacaactgccatgctggtgacggaccggtgctttgacgtgctcggcggggaggccgggaggccggagggcttggtcgaagccgtgttgcaggcggtcgggttcgagtggtcggaggtcaaggacgccgccaaggccccaacagaggaggcctgaccatgagcgatgcgcccaacaccaccttcctgcgcctggaggggccgttgcaggcgtggggcgacaactcgaagttcgtcatccgccgcacgatggaggcccccaccaagtcgggtgtccttggcctgatctgctgtgccatgggactgaaccggcaggcggcgcggtgcaaactgcgcaccctcaacgacttggtcatgggcgtgcgcatcgaccggcccggcacgcgctggtgggactaccacacggtcggggcgaaggtcggcattctgaaggccgacgggaatggtatcaagcggacgggcggcggcaagcacgaccccatcgagaccctcgtctctcgccgcgagtacctgtgcgacgcgagttttctcgtggcgttgcagggcgatgccgggctggtggagcgcgtggcggacgccctgcggaacccgaagtggcccgtcttcctggggcgcaagtcctgcccgccgagcgtgccggtgttcgcccgacaagggcagcactccgacctgctggcggcgcttgcggctgtgccctggccgtcgcggtacagcaagcgcgagcatccagggaagccgttcgcctgtgtcatcgaatggcggccgtccgaggctaagccgaccgccccacccgacgctgaggtctggtacgaccggcccgtctccttcgatccgccggtgcacgaaccccgtctcgtggtccgtggctgcgtgaccgtcgaggccggcgatccgacccagcaacacacgccgcctccgccacgcccccgcgcgaactaccggaacgagcagtacaggtgcgcacgcgggaagcgcctcaggtgtgaccaggggctttgtgtgttctgcaagtccccggcgacgaccgtccagcacgtcacctaccgtcgggccggtggaggtgaggagccggaggaccttcgctcgctgtgccgactctgccacgacgcggtgacgatgatcgagtatggcttgggcatgggcctggatcgcatcgacccggaggacccgcgctggcgcgaggcgatcatcgggaagcgcgacgagatcatccggttccgcagcgtggagggccggcgtcgcgccctgcggggtgcgcccgaacgggtccggcgggagctgctggagggagaggaggtctgagccgtgtaccactcacacctgctcatcaacgtgggcgaagaccccgaccgagcggactgggacatctgccgccgctggctgcggaacctctaccgggtgcaccagcgtctgtgcatggcgttcccgtccgctgactccggcggcggcgacgtgcaccagacgcgaggcgggaacgggggcttcctgttccgcatagactacccggccaacacggagcgaggcgggcgccggccggtcgtcctcgtccagtccgccagccagcccaactgggacgacgccttcggcctgacgaaagacgcgaaggatgatggcgggcgcctcatcggcgacgcggggttcctgctcgccgcgccgccgcaatccagggaggtctccttcggtcttgatggcgagacactgaccctctcttgccctagtcgcccggatcagtgctgccgcgtgcgccttggcgaccttgtgcgcttccgactgcgggccaacccgacgcgcagagctcacgacaacggcaagcgcctgcgcgtcgagccgggactcgaggcccatgccgactggctgacgagcaaacttgtggacactggggcttcgccgatctgcattgagaccttcgctcccagttgggcttacggttggcaaggcgagcacgagccacagggtccccgacgaatgcagtggtggtcggtgctgttcgaggggtcgtttcgcgtggggaacacagcagcgctcaaggcgcttctggaatcgggcatcggctcggcgaaggccttcggtttcggtctgctctcagttgcgccggcggggtgaggcgcgaggggagggtgagggatggagagcctgcagcttgtgccgcgtttcgatgacagcctcagctacgtctacgccgagcacgcgcgggtggaccgttgggagagcagcctcggcttgtgggatgagaagggggtgacggagctgcccgtggccgcgatccggtgtctgatgctcgggccgggcagtagcgtcacccatgcggccatcgaccttctcgcggagatgaactgcctggtcgtctggtgcggcgaggagatggtccgcttctacgcccacggcctcggcgggacgcgcagcgcacggcgtctgctgcaccaggtgaaccagtggagcgacccggcggcccacatgcgcgtcgtccgccgcatgtacgcccggcgcttcgcagagatcccgccggccgacgtgactctccagcagctacggggcatggaggggttccgcgtgagggagacgtatcggcgtctgagtgaggagaccggcgtggcgtgggccgcgcggtcgtatgaccgcggcacctggacgcgagcggacccgatcaaccgggcggtgtccgctgcgaactcgtgcctctacggtatctgccatgcggctatcctttcggcaggctactgcgccgcgctgggcttcatccacacgggcaagcagctatcgttcgtgtacgacgtggcggacctgtacaagaccgacctgagcctgcccgtggccttccgcgtcacgcagtcgagtccgtccgaactggagcgggaggtccggcgcgccatgcgggatgcgttccgctcggcgaagctgatcgaccggatcatccccgatctgcgcgagttgctggaggacagcacgacagaggaagagctgcagcagtacgacgacgacgaggcccggccggcgggactctgggagccgcctgccttggggcaagggggaatgtgaatggtggttctgatcgtagaggacgccaaaccggcactgcgcggcttgctgagtcggtggctgatcgagccacgggcgggagtgttcgtcggccggctgtcggcgcgggtgcgtgatcgcctgtgggagcgagtggtgaactcgggcaagtcgcggggtgccttgctggtctacggcgcacagaacgagcaggggttcgccgtccggtcgttcggcgacacttcgcgtgagccggtggacttcgaggggctgacgctgatccgctgcccgaaggagagcaagacgcatcgcgagcactacgggaagagagggcgtgaaggcgacggcgtgagcggaaccgcgtcggagtcgtccggcggcaaccgccgccttgtctagcttctcggcgaatcgtggtgtgctccccacgcacgtgggggtgaaccggcatcctggatcgcttggtcggggacgaggaagtgctccccacgcacgtgggggtgaaccgacccccatcgcgaccacatcgtcatacaccaggtgctccccacgcacgtgggggtgaaccgggaacgtgttggtccgaaggcacgacgtgcgggtgctccccacgcacgtgggggtgaaccgtcaggcacttggtcgttctgggcgccagtttcgtgctccccacgcacgtgggggtgaaccgcaaggcgcgcaggaggaagtcgatgctcggacgtgctccccacgcacgtgggggtgaaccggggtgaggtctatgcgagacggggactcggtggtgctccccacgcacgtgggggtgaaccgaagacgcgggaggccgtgtccctggccgtcgcgtgctccccacgcacgtgggggtgaaccgaagaggcccgtgtcggtcccatccgcatcatacagtttgtaggtgtgctccccacgcacgtgggggtgaaccgagtgctactacgccgtaaggagtcgcctacatgtgctccccacgcacgtgggggtgaaccgacgacgaatcgggtatgaggcccccgagggttgtgctccccacgcacgtgggggtgaaccggagacggcccgcgaggtccgggagaggaacatgtgctccccacgcacgtgggggtgaaccgtcagcgagtccatcctggcacggaagatcaccgtgctccccacgcacgtgggggtgaaccgaagccgagggccaggaaggcgaagcgcgacgggtgctccccacgcacgtgggggtgaacccatacctctcccgccgttactgggacctccctcgtgctccccacgcacgtgggggtgaaccgcaggcgcgcaacaagctgctcaaggcgctgatgtgctccccacgcacgtgggggtgaaccgcaggctcggtatttgcgtctacgagcgaaatagtgctccccacgcacgtgggggtgaaccgacgatcaagcacgagctgcacccgatcctcccgtgctccccacgcacgtgggggtgaaccggggacccgcatgatgtggtctacgcgggaggggtgctccccacgcacgtgggggtgaaccgaccgcacctgtatctactacccggatgcgagtgtgctccccacgcacgtgggggtgaaccggtgtgggattacgatttcaaggccgcaaagcagtgctccccacgcacgtgggggtgaaccggaggccctccggccttgcacacggggtttagagtgctccccacgcacgtgggggtgaaccgtgtgcatcggcggtcgcgacataggggaactcgtgctccccacgcacgtgggggtgaaccgtcatctgcctcatcgcagccctgacagcatcggtgctccccacgcacgtgggggtgaaccgtacttcggctgctcgtcgagaccgagcatcgggtgctccccacgcacgtgggggtgaaccggactgcgcctgcccgtttcaggtatcctcgatgtgctccccacgcacgtgggggtgaaccggctgactacctcgcgagggcaatcctctccgagtgctccccacgcacgtgggggtgaaccgactccttctttcgggcgcggcgaatggcacgagtgctccccacgcacgtgggggtgaaccgaagaagttccggcggacgaagggcaccttgagtgctccccacgcacgtgggggtgaaccggcgacggagaggacgaactctccgccgcagccgtgctccccacgcacgtgggggtgaaccggtcgctaccgccgacccatcaacgccagtaatgtgctccccacgcacgtgggggtgaaccgaagggacctgttctggcgctctggtggggcattgtgctccccacgcacgtgggggtgaaccggccgtcgtcgccggtcgctatggccatgcctcgtgctccccacgcacgtgggggtgaaccgacgttatcggtgccgtgctgcaatggatgagcgtgctccccacgcacgtgggggtgaaccgtgcaactccttgattctctgttggatggcaacgtgctccccacgcacgtgggggtgaaccgtcgctcctacggttgtgggaggccacttgaacgtgctccccacgcacgtgggggtgaaccggccgataggttcatctgccagtcgctcacgatgtgctccccacgcacgtgggggtgaaccgtcgatccgtgtggccccgtacgctcccggccagtgctccccacgcacgtgggggtgaaccgtatcgtctgtcccctcggcctctcccggcagggtgctccccacgcacgtgggggtgaaccgggcagtcatcgctaccgcaactaccgcgtggcgtgctccccacgcacgtgggggtgaaccgcagttccccgcagcagcagatgatcttaggcggtgctccccacgcacgtgggggtgaaccggcgggcggccgcgatgatcgcgggaacctgaagtgctccccacgcacgtgggggtgaaccgggtgaggcggtcgttgaccaggatgggaatgtgtgctccccacgcacgtgggggtgaaccgtgggcccacgagatcgccctcagccgcccgaagtgctccccacgcacgtgggggtgaaccggcgctggcctcggtcgcccccgtggcgtcggagtgctccccacgcacgtgggggtgaaccgatcaggtcctcggtcggctcctcggtcgtgcagtgctccccacgcacgtgggggtgaaccgctatcgagccagggcgccgcggcggggatgacgtgctccccacgcacgtgggggtgaaccggcgcaatcggccttgcgctggccggcggccgtgtgctccccacgcacgtgggggtgaaccggtggcggaagcggtcaaacacggctggaagccgtgctccccacgcacgtgggggtgaaccggccggcccagctcgcgcgggagttctcgcgccgtgctccccacgcacgtgggggtgaaccgctgggcgacctccatccgcgcgggggcgacgagtgctccccacgcacgtgggggtgaaccggcgcaatcggccttgcgctggccggcggccgtgtgctccccacgcacgtgggggtgaaccggaccccagccatgacccgccaggacctgttcgtgctccccacgcacgtgggggtgaaccggacacgggccttcgccgggtccgcgaccagttgcgctccccacgcacgtgggggtgaaccggcgcccattgtccccgtgacgatcctggtctggcgctccccacgcacgtgggggtgaaccggtgctgcccatgctggagcagtggcagtcgccgtgctccccacgcacgtgggggtgaaccatcggtgcaagtcagcgccacgccgccactcccgtctcccatgcaagccccaggagggcgtctgggcctcggcccgcacctcctacctatcccgaggcctcggaggcctctgtaggccgtcggtggcccgcccgcgcgggcccgctgctcactgcccctccggcgcaggcgcgctgatcccgaggtagaaggccgtgggcgtttggtgtttcgcagccgccgcgtgcacgtagttccgcgcggtcaccgagctggctcaaccggcctccccctggagccgggcgggagggccctgcggggaaggtctcgtcccgccacggagggcctcggcacactagctgcccgtccgcagaccctcgcgtccgttcaggtgcgcacgagcctagggagcgccgcggtcgtcgctggccgcccgaccggggactggccgacgccacagcgaacgagacgccccaccagagagccagaagaagccgtttcttgcgtcgcttttgctcctgcgggtcatagtggcctagcgaggttctcgtgtcaaactggacgccaactaggcctctgcggttgaggtgacccaatgccagccgccaaccgggcgtacaagcgcgaggcagagaccgccgccgctcaagtccgccaggtgcaggcggcgaacgcgagcgtgcgtcggatcatagggggttgtctcggcaactctccgaggccagggccgcggcatcgcaggccgctccggcacttgtcactatcctggtcgtggacgggcccctggagagcgtattcggtccggggcacatcgcctcggttgtcgccaggacgacgacgaaggtggccccttgcgtcgtcgaggcggtgaaggccttccccgtcgcctcgcccgacgcgctgcctcttgaccttcagccgttcgtggagtcggcctagagggaggccgttcgggacgccgaagaccgcatgggttgccggcttgccaagaggctattgccgtgaatgggcggacctctccggtggcctcgccttagtgggtccagggcataactgatcgacgggcatcccggtcatccttgctaccggcacgccgatcctcttggcccattccaccaccgtctcccgagcaacgcccagtttgagcgccaatgccaccgcggaactcagcggggtgcgctccaccaattccctccacaggatggcctcgatgcattccttggtgcccgtcagtttgcgccagttggcctcggcctggcgaatagggcctccggcgactagctgcccgtccgcagaccggcgcgtctgtgtaggtgcgcacgagcttagagagcatcgcgctcgccgctggccccccattcgcgccagtcggtgcggctctgtatcgggaggccgagccgccgcgcccagttgacgacggtgaggtggctgacgccgagcacctcactcaggtccttggcgctcgtcggcggctgcttgtcacgcatctctgtgcggagaatgcgttccatgctccaggcctgcccggtcgctcgcttccaggcgagttcggcctgtctgatcttgcttgcgtggtggcccctcggtagtcgccgctgcttgtccttgaggagcagcgtgtgcgtctgccgggtgtgcggcgcctcccggtcacagaggatgcagttggcttcgaggtcgtcgtccccccagacagggcgcacctcaatggtcgagagctgcgcgagggccgcgtctccgg

SEQ ID NO: 953 - DNA, 109703 bp, Artificial Sequence
  Synthetic Oligonucleotide
  misc_feature (1)..(7311): n is a, c, g, or t
nnnnnnnnnnnnnnnnnnnnnnnnnnnnnnnnnnnnnnnnnnnnnnnnnnnnnnnnnnnnnnnnnnnnnnnnnnnnnnnnnnnnnnnnnnnnnnnnnnnnnnnnnnnnnnnnnnnnnnnnnnnnnnnnnnnnnnnnnnnnnnnnnnnnnnnnnnnnnnnnnnnnnnnnnnnnnnnnnnnnnnnnnnnnnnnnnnnnnnnnnnnnnnnnnnnnnnnnnnnnnnnnnnnnnnnnnnnnnnnnnnnnnnnnnnnnnnnnnnnnnnnnnnnnnnnnnnnnnnnnnnnnnnnnnnnnnnnnnnnnnnnnnnnnnnnnnnnnnnnnnnnnnnnnnnnnnnnnnnnnnnnnnnnnnnnnnnnnnnnnnnnnnnnnnnnnnnnnnnnnnnnnnnnnnnnnnnnnnnnnnnnnnnnnnnnnnnnnnnnnnnnnnnnnnnnnnnnnnnnnnnnnnnnnnnnnnnnnnnnnnnnnnnnnnnnnnnnnnnnnnnnnnnnnnnnnnnnnnnnnnnnnnnnnnnnnnnnnnnnnnnnnnnnnnnnnnnnnnnnnnnnnnnnnnnnnnnnnnnnnnnnnnnnnnnnnnnnnnnnnnnnnnnnnnnnnnnnnnnnnnnnnnnnnnnnnnnnnnnnnnnnnnnnnnnnnnnnnnnnnnnnnnnnnnnnnnnnnnnnnnnnnnnnnnnnnnnnnnnnnnnnnnnnnnnnnnnnnnnnnnnnnnnnnnnnnnnnnnnnnnnnnnnnnnnnnnnnnnnnnnnnnnnnnnnnnnnnnnnnnnnnnnnnnnnnnnnnnnnnnnnnnnnnnnnnnnnnnnnnnnnnnnnnnnnnnnnnnnnnnnnnnnnnnnnnnnnnnnnnnnnnnnnnnnnnnnnnnnnnnnnnnnnnnnnnnnnnnnnnnnnnnnnnnnnnnnnnnnnnnnnnnnnnnnnnnnnnnnnnnnnnnnnnnnnnnnnnnnnnnnnnnnnnnnnnnnnnnnnnnnnnnnnnnnnnnnnnnnnnnnnnnnnnnnnnnnnnnnnnnnnnnnnnnnnnnnnnnnnnnnnnnnnnnnnnnnnnnnnnnnnnnnnnnnnnnnnnnnnnnnnnnnnnnnnnnnnnnnnnnnnnnnnnnnnnnnnnnnnnnnnnnnnnnnnnnnnnnnnnnnnnnnnnnnnnnnnnnnnnnnnnnnnnnnnnnnnnnnnnnnnnnnnnnnnnnnnnnnnnnnnnnnnnnnnnnnnnnnnnnnnnnnnnnnnnnnnnnnnnnnnnnnnnnnnnnnnnnnnnnnnnnnnnnnnnnnnnnnnnnnnnnnnnnnnnnnnnnnnnnnnnnnnnnnnnnnnnnnnnnnnnnnnnnnnnnnnnnnnnnnnnnnnnnnnnnnnnnnnnnnnnnnnnnnnnnnnnnnnnnnnnnnnnnnnnnnnnnnnnnnnnnnnnnnnnnnnnnnnnnnnnnnnnnnnnnnnnnnnnnnnnnnnnnnnnnnnnnnnnnnnnnnnnnnnnnnnnnnnnnnnnnnnnnnnnnnnnnnnnnnnnnnnnnnnnnnnnnnnnnnnnnnnnnnnnnnnnnnnnnnnnnnnnnnnnnnnnnnnnnnnnnnnnnnnnnnnnnnnnnnnnnnnnnnnnnnnnnnnnnnnnnnnnnnnnnnnnnnnnnnnnnnnnnnnnnnnnnnnnnnnnnnnnnnnnnnnnnnnnnnnnnnnnnnnnnnnnnnnnnnnnnnnnnnnnnnnnnnnnnnnnnnnnnnnnnnnnnnnnnnnnnnnnnnnnnnnnnnnnnnnnnnnnnnnnnnnnnnnnnnnnnnnnnnnnnnnnnnnnnnnnnnnnnnnnnnnnnnnnnnnnnnnnnnnnnnnnnnnnnnnnnnnnnnnnnnnnnnnnnnnnnnnnnnnnnnnnnnnnnnnnnnnnnnnnnnnnnnnnnnnnnnnnnnnnnnnnnnnnnnnnnnnnnnnnnnnnnnnnnnnnnnnnnnnnnnnnnnnnnnnnnnnnnnnnnnnnnnnnnnnnnnnnnnnnnnnnnnnnnnnnnnnnnnnnnnnnnnnnnnnnnnnnnnnnnnnnnnnnnnnnnnnnnnnnnnnnnnnnnnnnnnnnnnnnnnnnnnnnnnnnnnnnnnnnnnnnnnnnnnnnnnnnnnnnnnnnnnnnnnnnnnnnnnnnnnnnnnnnnnnnnnnnnnnnnnnnnnnnnnnnnnnnnnnnnnnnnnnnnnnnnnnnnnnnnnnnnnnnnnnnnnnnnnnnnnnnnnnnnnnnnnnnnnnnnnnnnnnnnnnnnnnnnnnnnnnnnnnnnnnnnnnnnnnnnnnnnnnnnnnnnnnnnnnnnnnnnnnnnnnnnnnnnnnnnnnnnnnnnnnnnnnnnnnnnnnnnnnnnnnnnnnnnnnnnnnnnnnnnnnnnnnnnnnnnnnnnnnnnnnnnnnnnnnnnnnnnnnnnnnnnnnnnnnnnnnnnnnnnnnnnnnnnnnnnnnnnnnnnnnnnnnnnnnnnnnnnnnnnnnnnnnnnnnnnnnnnnnnnnnnnnnnnnnnnnnnnnnnnnnnnnnnnnnnnnnnnnnnnnnnnnnnnnnnnnnnnnnnnnnnnnnnnnnnnnnnnnnnnnnnnnnnnnnnnnnnnnnnnnnnnnnnnnnnnnnnnnnnnnnnnnnnnnnnnnnnnnnnnnnnnnnnnnnnnnnnnnnnnnnnnnnnnnnnnnnnnnnnnnnnnnnnnnnnnnnnnnnnnnnnnnnnnnnnnnnnnnnnnnnnnnnnnnnnnnnnnnnnnnnnnnnnnnnnnnnnnnnnnnnnnnnnnnnnnnnnnnnnnnnnnnnnnnnnnnnnnnnnnnnnnnnnnnnnnnnnnnnnnnnnnnnnnnnnnnnnnnnnnnnnnnnnnnnnnnnnnnnnnnnnnnnnnnnnnnnnnnnnnnnnnnnnnnnnnnnnnnnnnnnnnnnnnnnnnnnnnnnnnnnnnnnnnnnnnnnnnnnnnnnnnnnnnnnnnnnnnnnnnnnnnnnnnnnnnnnnnnnnnnnnnnnnnnnnnnnnnnnnnnnnnnnnnnnnnnnnnnnnnnnnnnnnnnnnnnnnnnnnnnnnnnnnnnnnnnnnnnnnnnnnnnnnnnnnnnnnnnnnnnnnnnnnnnnnnnnnnnnnnnnnnnnnnnnnnnnnnnnnnnnnnnnnnnnnnnnnnnnnnnnnnnnnnnnnnnnnnnnnnnnnnnnnnnnnnnnnnnnnnnnnnnnnnnnnnnnnnnnnnnnnnnnnnnnnnnnnnnnnnnnnnnnnnnnnnnnnnnnnnnnnnnnnnnnnnnnnnnnnnnnnnnnnnnnnnnnnnnnnnnnnnnnnnnnnnnnnnnnnnnnnnnnnnnnnnnnnnnnnnnnnnnnnnnnnnnnnnnnnnnnnnnnnnnnnnnnnnnnnnnnnnnnnnnnnnnnnnnnnnnnnnnnnnnnnnnnnnnnnnnnnnnnnnnnnnnnnnnnnnnnnnnnnnnnnnnnnnnnnnnnnnnnnnnnnnnnnnnnnnnnnnnnnnnnnnnnnnnnnnnnnnnnnnnnnnnnnnnnnnnnnnnnnnnnnnnnnnnnnnnnnnnnnnnnnnnnnnnnnnnnnnnnnnnnnnnnnnnnnnnnnnnnnnnnnnnnnnnnnnnnnnnnnnnnnnnnnnnnnnnnnnnnnnnnnnnnnnnnnnnnnnnnnnnnnnnnnnnnnnnnnnnnnnnnnnnnnnnnnnnnnnnnnnnnnnnnnnnnnnnnnnnnnnnnnnnnnnnnnnnnnnnnnnnnnnnnnnnnnnnnnnnnnnnnnnnnnnnnnnnnnnnnnnnnnnnnnnnnnnnnnnnnnnnnnnnnnnnnnnnnnnnnnnnnnnnnnnnnnnnnnnnnnnnnnnnnnnnnnnnnnnnnnnnnnnnnnnnnnnnnnnnnnnnnnnnnnnnnnnnnnnnnnnnnnnnnnnnnnnnnnnnnnnnnnnnnnnnnnnnnnnnnnnnnnnnnnnnnnnnnnnnnnnnnnnnnnnnnnnnnnnnnnnnnnnnnnnnnnnnnnnnnnnnnnnnnnnnnnnnnnnnnnnnnnnnnnnnnnnnnnnnnnnnnnnnnnnnnnnnnnnnnnnnnnnnnnnnnnnnnnnnnnnnnnnnnnnnnnnnnnnnnnnnnnnnnnnnnnnnnnnnnnnnnnnnnnnnnnnnnnnnnnnnnnnnnnnnnnnnnnnnnnnnnnnnnnnnnnnnnnnnnnnnnnnnnnnnnnnnnnnnnnnnnnnnnnnnnnnnnnnnnnnnnnnnnnnnnnnnnnnnnnnnnnnnnnnnnnnnnnnnnnnnnnnnnnnnnnnnnnnnnnnnnnnnnnnnnnnnnnnnnnnnnnnnnnnnnnnnnnnnnnnnnnnnnnnnnnnnnnnnnnnnnnnnnnnnnnnnnnnnnnnnnnnnnnnnnnnnnnnnnnnnnnnnnnnnnnnnnnnnnnnnnnnnnnnnnnnnnnnnnnnnnnnnnnnnnnnnnnnnnnnnnnnnnnnnnnnnnnnnnnnnnnnnnnnnnnnnnnnnnnnnnnnnnnnnnnnnnnnnnnnnnnnnnnnnnnnnnnnnnnnnnnnnnnnnnnnnnnnnnnnnnnnnnnnnnnnnnnnnnnnnnnnnnnnnnnnnnnnnnnnnnnnnnnnnnnnnnnnnnnnnnnnnnnnnnnnnnnnnnnnnnnnnnnnnnnnnnnnnnnnnnnnnnnnnnnnnnnnnnnnnnnnnnnnnnnnnnnnnnnnnnnnnnnnnnnnnnnnnnnnnnnnnnnnnnnnnnnnnnnnnnnnnnnnnnnnnnnnnnnnnnnnnnnnnnnnnnnnnnnnnnnnnnnnnnnnnnnnnnnnnnnnnnnnnnnnnnnnnnnnnnnnnnnnnnnnnnnnnnnnnnnnnnnnnnnnnnnnnnnnnnnnnnnnnnnnnnnnnnnnnnnnnnnnnnnnnnnnnnnnnnnnnnnnnnnnnnnnnnnnnnnnnnnnnnnnnnnnnnnnnnnnnnnnnnnnnnnnnnnnnnnnnnnnnnnnnnnnnnnnnnnnnnnnnnnnnnnnnnnnnnnnnnnnnnnnnnnnnnnnnnnnnnnnnnnnnnnnnnnnnnnnnnnnnnnnnnnnnnnnnnnnnnnnnnnnnnnnnnnnnnnnnnnnnnnnnnnnnnnnnnnnnnnnnnnnnnnnnnnnnnnnnnnnnnnnnnnnnnnnnnnnnnnnnnnnnnnnnnnnnnnnnnnnnnnnnnnnnnnnnnnnnnnnnnnnnnnnnnnnnnnnnnnnnnnnnnnnnnnnnnnnnnnnnnnnnnnnnnnnnnnnnnnnnnnnnnnnnnnnnnnnnnnnnnnnnnnnnnnnnnnnnnnnnnnnnnnnnnnnnnnnnnnnnnnnnnnnnnnnnnnnnnnnnnnnnnnnnnnnnnnnnnnnnnnnnnnnnnnnnnnnnnnnnnnnnnnnnnnnnnnnnnnnnnnnnnnnnnnnnnnnnnnnnnnnnnnnnnnnnnnnnnnnnnnnnnnnnnnnnnnnnnnnnnnnnnnnnnnnnnnnnnnnnnnnnnnnnnnnnnnnnnnnnnnnnnnnnnnnnnnnnnnnnnnnnnnnnnnnnnnnnnnnnnnnnnnnnnnnnnnnnnnnnnnnnnnnnnnnnnnnnnnnnnnnnnnnnnnnnnnnnnnnnnnnnnnnnnnnnnnnnnnnnnnnnnnnnnnnnnnnnnnnnnnnnnnnnnnnnnnnnnnnnnnnnnnnnnnnnnnnnnnnnnnnnnnnnnnnnnnnnnnnnnnnnnnnnnnnnnnnnnnnnnnnnnnnnnnnnnnnnnnnnnnnnnnnnnnnnnnnnnnnnnnnnnnnnnnnnnnnnnnnnnnnnnnnnnnnnnnnnnnnnnnnnnnnnnnnnnnnnnnnnnnnnnnnnnnnnnnnnnnnnnnnnnnnnnnnnnnnnnnnnnnnnnnnnnnnnnnnnnnnnnnnnnnnnnnnnnnnnnnnnnnnnnnnnnnnnnnnnnnnnnnnnnnnnnnnnnnnnnnnnnnnnnnnnnnnnnnnnnnnnnnnnnnnnnnnnnnnnnnnnnnnnnnnnnnnnnnnnnnnnnnnnnnnnnnnnnnnnnnnnnnnnnnnnnnnnnnnnnnnnnnnnnnnnnnnnnnnnnnnnnnnnnnnnnnnnnnnnnnnnnnnnnnnnnnnnnnnnnnnnnnnnnnnnnnnnnnnnnnnnnnnnnnnnnnnnnnnnnnnnnnnnnnnnnnnnnnnnnnnnnnnnnnnnnnnnnnnnnnnnnnnnnnnnnnnnnnnnnnnnnnnnnnnnnnnnnnnnnnnnnnnnnnnnnnnnnnnnnnnnnnnnnnnnnnnnnnnnnnnnnnnnnnnnnnnnnnnnnnnnnnnnnnnnnnnnnnnnnnnnnnnnnnnnnnnnnnnnnnnnnnnnnnnnnnnnnnnnnnnnnnnnnnnnnnnnnnnnnnnnnnnnnnnnnnnnnnnnnnnnnnnnnnnnnnnnnnnnnnnnnnnnnnnnnnnnnnnnnnnnnnnnnnnnnnnnnnnnnnnnnnnnnnnnnnnnnnnnnnnnnnnnnnnnnnnnnnnnnnnnnnnnnnnnnnnnnnnnnnnnnnnnnnnnnnnnnnnnnnnnnnnnnnnnnnnnnnnnnnnnnnnnnnnnnnnnnnnnnnnnnnnnnnnnnnnnnnnnnnnnnnnnnnnnnnnnnnnnnnnnnnnnnnnnnnnnnnnnnnnnnnnnnnnnnnnnnnnnnnnnnnnnnnnnnnnnnnnnnnnnnnnnnnnnnnnnnnnnnnnnnnnnnnnnnnnnnnnnnnnnnnnnnnnnnnnnnnnnnnnnnnnnnnnnnnnnnnnnnnnnnnnnnnnnnnnnnnnnnnnnnnnnnnnnnnnnnnnnnnnnnnnnnnnnnnnnnnnnnnnnnnnnnnnnnnnnnnnnnnnnnnnnnnnnnnnnnnnnnnnnnnnnnnnnnnnnnnnnnnnnnnnnnnnnnnnnnnnnnnnnnnnnnnnnnnnnnnnnnnnnnnnnnnnnnnnnnnnnnnnnnnnnnnnnnnnnnnnnnnnnnnnnnnnnnnnnnnnnnnnnnnnnnnnnnnnnnnnnnnnnnnnnnnnnnnnnnnnnnnnnnnnnnnnnnnnnnnnnnnnnnnnnnnnnnnnnnnnnnnnnnnnnnnnnnnnnnnnnnnnnnnnnnnnnnnnnnnnnnnnnnnnnnnnnnnnnnnnnnnnnnnnnnnnnnnnnnnnnnnnnnnnnnnnnnnnnnnnnnnnnnnnnnnnnnnnnnnnnnnnnnnnnnnnnnnnnnnnnnnnnnnnnnnnnnnnnnnnnnnnnnnnnnnnnnnnnnnnnnnnnnnnnnnnnnnnnnnnnnnnnnnnnnnnnnnnnnnnnnnnnnnnnnnnnnnnnnnnnnnnnnnnnnnnnnnnnnnnnnnnnnnnnnnnnnnnnnnnnnnnnnnnnnnnnnnnnnnnnnnnnnnnnnnnnnnnnnnnnnnnnnnnnnnnnnnnnnnnnnnnnnnnnnnnnnnnnnnnnnnnnnnnnnnnnnnnnnnnnnnnnnnnnnnnnnnnnnncgccttcgccttcgccttcgccctcgccttcgccttcaccctcgccttcaccctcgccttcgccttcgccttcaccttcaccttcgccctcgccttcaccctcgccttcgccctcgccttcgccttcgccctcaccttcgccctcgccttcgccttcgccctcgccttcgccttcaccttcgccttcaccttcgccttcaccttcgccttcaccctcgccttcaccctcgccttcgccttcgccctcgccttcgccttcgccttcaccctcaccctcaccttcgccctcgccctcgccctcgccagttgcgggcttcgggtcggtggcggcgagaaactcctgcgcattggttaggccgtcgccatcgggatcatcgtttccggaataggcatcgagggtctgaaaatgttcgatttcccacgtatccgggaggttgtcgccgtcggtatccgccggatcgtaaattcccaagacgccattcatggtttggggcaacaccgatgcggagccgtccgcattcgccaaggcttggggcgatatcgtttttgcggcggaaagggcaagagccagcgtaccgggagcagttcccggcggcacgttgacgacaatcttcatcagggcgccttcgtttgcggcgaaggtgctgttcttcgaataggcgatgacggtagcttttgtgccggccatgtggtaatcgagagtaaaatcgccgttatcgagcaaagcgccgggctgcagtcccacgatggccgaaccgtctggcaggcggatgctgccgttgagacccgcataagcttcatcgccgtccgccagccgcaagacgacgatcgtctgcccaccgggaatcgtgttggcgttgtctagtgcgaacacggggatggcttgcgcgcccggcgcaagacatgccaggaaaagcagcgttccgaattgggaaaatcccgtgtttcgcatatcgtctctcccttcagtaacggataatgtacgtcacgacagccgacggctggatgttgttgtggggctgatcgccgcctgtcatgctggtagaagcagttctttccatttcttcatcgtcggccacatcgcggtcgttggcgtcatccgaatcattgtcgcgctggtatttgtcctgatacgagtggttgtgacgcggcatctcatcgatggtgagggtgtgcgtctcttcgcctagttgggcgccgacggtgcgttcggtgaggccgctgccttggcccgcgcccataggaacgcgcccccgcaaatcgggcacgttaaaggtgtttgtcccgtcgccactgccccagatggtgccgatggcggcaaagaggtcggaatatttgctgcgttccaccgcgcgtccgtcgcagggcaaatagcccaggggctggtccacgttggcttcgcccgcaaagggcaggacggttcccgcaggcacgcggttgaggaggctcgttgcattgtcggccgtttttgcctgaatcgcgtagggactgcaaagtatctgttgccggggcaacatctcttggggattggccagcggtgtgcctgttttgtccgattcgatggtgatacccaagtagcgcgtgttggaggagaaggccgacgaaatggcaacgacacccacggtgggcgaaacttcgagggcggtgccgccgctgtcgcccagaatcacgttgaacatgccgttgttcaccggcgcctcatagcggcgtccccaaatgacattcccgccggtgttcgcatcgtagatccggaaggatatcgagtagacgccgtcgggaaggggagttccgtctggttgggtgagttcgccctgataattcatcgcatcgggcactgacgccgcccatgccggcgccgcgccggtcgctacaagagccgtcaggataaaggccgctacaagatgtctcatggtagatctcctgtttccacaacgatgctttgccgcaaaaaaccacattttgttgtctctttgctaaaagggcctgtttttggcccgatgattgaaatagatctcgatatcgtcacagtcattgacgcgcaacttggtttgatttccgtcttttgcatagatcaccagacgccagccggtggcggccacgctgcgttcggcgaattcgttgaaggtgttgaggggcgtggtgtcgcgggaggaattgacaagattgagaacgacgtttacggtcagcccttcgttgaagcgccatcccggcggctgcggcggattggccgcgggatttcccggatgcttgtaccaaaatcgcgttgaccatgccgttgattcgcccacataatggttcggttcgccgggaaccggctggcccatctccaaattgcggataaactgcacgccgccttgggtaagggttcctgccacggccgtgaaggcgccggagtgggatccgggaatgttgatcttcatgtaattgatcttgtcgaggaatgcaccggggctcagaagcgtgccgttggcggcgtatcgcggcccaaagaagaaactgagcccattatccagcacggtgctgaaatcgagtacaatgacgccggaggcgtcttggtgttcgagtagataattgcggaacaactgggtggcggtacgaagttttccagtctgttcgtccaagtagtaaagtgtgtttccggcggcgtctttcttccggtaaccgaggatgtcctcggtaaacgacagccagtcttccttggcgactccgccgggaagaccgagttcgaaatcgaaggccttgacggcgttaacgatgtcgatcaactcgtcggcggttcgtgccccaaatacggaattgagcgaatagccgtcgcccatgacgaaaccggcgatattgtgcttgtactcgaaggcgcgcaacgtgaaatacacccatcgctgggccgtttcgaaggccttctgggcctcgagcatgtcgccctgaaaacgcaggcggtgcgtcgggtcggcataatagcgattgaggaggtcctggctgagttccgccatggtggcctcgatcgtggccttttcgccaaacagccccgcaagccgcgccacctcctgattgagcaataggccggcttcctgcgactgtaactggtaggttttcatgtcgagcagccatgttttgatggcggccttgctattgacgtcgagcagggcgtcttcctgcgcgcgaatttcagcctgttccatggcggcgaggacttccttctccgcctcgatttcgcccttgtcttcttcccattggtattggagcgcggcgttcacgctaaaggcaatgagtccgccgcttaccgtggtcgttccctggagatcggctccataggaaatgctttgttggatgcagttcgcggcggcggccagattgtcggcgcgcacctgcagggcctggatatgggcaatctccttggtgagcgaggcctgcttgttgccgtagcggatcatgatggactggatattggcattgatgccggcctcctgggcgcggcgttggacttcgatttcgacctgttgcttgaggttggcgatcttctgctggttctgctgaatgcggttggcggccaactgaatgctggtgacttgcaggttgatctcgctgccttggttttcggccggtttcagataggcgagatggaccggattggcgggatcgggtcccggatccacacccgtaatggcagccagacgctcgcgatatcctttgacttggacggccatgtcggcggatagctggtcttggctgccgcggtaggtctgatagctggcgcgggccttgtcgagtttggccttggccgcgccaaggggcgaagttatgtctccgacattgttccagttgaggagggcgtcgaacgaatccttcgtgttttcgaactgttgtaccagcatcagaaaatcttcgcggaacccgagcagattcaaattgccgtccatgaaggccttcaagccgttcaattcgccgatgctgttctgccagcttgcgatggtttcagggatgcccgaatcggcgggcatttcgtccggatcgtaatcgggaaagatgccgagaaggatctgcccttcgatgtccattttcgacagagtctcgttgatgagggttttggctttctcgatatcgcctggtgtcgcaccgttgcgcggattcccccgcatgatgtagcacatggccagttcgcgcgccgcaaccgcctgatcgcgcagcacattgaacatgatggcccagtccttgtaaccggtgaggagcggcgcggcctcgttcttggagctacagagcacgggaaccggattgtcgttttcgtcgcggaacgtggccgcatacaaagatcgtccgggcacctccgtcacgaagacgagatagccaaacggcggatagtctccgttgcccgtttgcgtccacgggaagaatcggggcatgtctacccccattccgtccgtaaacaattcgtaatagggtgttgctgcatccttataggcctccatggccctctcgaaggcgcggatctccgcatcgataacccgttcgccgggcagcggcacatcaatccgtcgcttgtaggcgcgcaccagtttttctttcgccaccaacagattggccatgcagcggtaataggcgatgtccagcaacacattgcgcagtttcttgtcgaaaggcgcgtatcggagcgcgtcgcgcaccatggtttcggcgctccggacaagggccaactcgtcatcgccaaacatttcggcgagcatctgatcgatttgggtttcggtgaggaggcggttttcgagttggttgacgggagtgtcgttcacgttgccgtagatttcgtcaatgaaccgaaatgcgggaggattggccggatcgtcaatgttgttgagcgaatccttgatgatcaacgtccatacaccccgggcattttcgccgctgaaagcggccagttggccttgcggcttgtgcggccccaaaaacggcggagaaccttctccgatggaaatcgtcgccgaatcacgaagaattaacgacgatcccccttccacacactgcccgaagttatcggcgccgccgcccacattggcaaagagcaggacttcctggccattgggcgatcggagcgagacttcgagatcctcgtcccaggagtgctcgatatcgagcgcgacctgcacgtcggccacgaccacgttgtcctccaccgttaccgacgatgtgatcataccgggattgggaatgtctttgggcgtttcgccaaaggcgggcgtgtacgaatcaattccctgttggaacaggcgaaagacggcgggacttccttccgcgccggcagcatttacgaagatagttgccgagcggggcagccccggattggccggcacgttgaaagtgaacgatccgttgtttgttccattggcgccggacaacgtgaggaattcgccctccgaaatttcggcctgccacgacattgtgccggcgcctgcattggctacgttgaccgtgacggaaccgcccgccgtggccactacactgctctgcgggttgatcgtcaagatattctccgcggcgccctgaacgaccagcaccacggcggggctgccgtccacattatgctcctccgtgtaaacacggatggcctggctgcggacgccgcccgtattggccccaaatttgaccttgaacgacccgctgtccgtgccgttgtcgtcaccgtcgaaacgcagccaagtgcccgaagccgatggaatcaattccgcatcccatttgaattccttcttgtcgagtttcttgacagttacgtcgaatgtggcggtcccggcggtgttgtccacctgccgaaccagcggagatacccagaactcggcatgccacgttttttccaggggcgcgctcttgtcaaggggcccttgggcggaggtaatcgtcaacgaccaatccagaagacggcccacgccccctgtctggtcttggcgaaacagcatggaccgtgcggtgctgatagtatcggacacaaaatgtgtgcgagccaaaaaaggcgcgcagggctggccaaaggaagacgcggcgagcaccaccgtcccgttggtgacaagttcaggcgtgggcaaatagacgctttcgcattcgatgatgccaggattcaacacggcgcccgggttgtcgctccatcgcccgtcgggaccgattgcggcgaaatcctcgtcgttgtccaattcattcggtttgccttcaccccaattcgtataggcgcctgaaccgccgctttcccaaacccatgtcccttcttcatcagcgtcgctaaaaccgatccaagcccgttcaagatggtccaaaagtcctgaaacatccgtgatccagtcattttcctcatcgtcgttcacggaaccaaggcgcctccacaacgttcggcttcggcttgggcgttccagtaactcaggggcgcggtaattttgtaataatggccattggcctcgttgtatacccagccgctttcaggagccgcataggcgccgcggtggccgttgaaaagcagggttcccggtgtttcgcttgtacccgggcaaaggtttgcaaatcgggggcgtacaagtcgtgtgtcattctgggcgccgctatcaacgccggttgccggattagcccccaagatcgcaacaacaagccacagcggcgtcgcgaccttccatgcgcgtttactgctgtatagtccgttcattcctgtttcgctcccgggtccaacttacttggcgtctacaagaggtgcttccggtacgtttacatcacccggcacttttttaagcacaaatccgccttcgatctgtgtggccagatgggcaaatgccctgttttcaggaatcatccgctcgataacagcccccgcgaattcggtcagcgcgtcaataacggtgtccttgtcgggcgcccggtaatggaactcgaaagagcgggtgaatcgggtggccaggcgcgaggtgtaagcgtcgggaacgggaattccctcgatccggagattgaaagcggtatccgtgaccgtaatggtctgtgcgggccagccttggcccggcggatcggattcgggaatgatcccggtgtcgtctccccggaagtatgcttgggcggttccgccggatcgaagaatgaccaaatcgaagccaagtccgcttgaaagttgccgggtgaccacgcctttccacaccgcgtcattatcttcgatgtacacggtgcaatcggatggtgttcccaccacatatccagtgccggccaaaatccggatttcaatggattcggtgttttctacggtcaaatcgtcaagaatccgtatgggaatctccgcctcaaagccgttcacggcggcgctaccggcaagcacggtaaaatcttcccctcccgtggccaaggatgtattgtccacgacgtaattcacggtccccataaaggcgctcgtaaagaggatctttaggattacatcgctttccccttcgtgggtttttaccatcgtggtttcgaaactcgctttgggaatcgcgccttgattacgcaggaaatagacgagatcgcccgcgtcgagacggccatcttcattcatgtccatcgcttcggcatcggattcggaaaggctgttcctgcccaagatagaatcgcgaaggttttcttccgtcacggggcctgttccagcggtactgcccatggcaaatgctaataaggcaatgaacacgatgagaaaacccactcgagatgaaattagcccagcgcatgcacgttccactcgaatccctccctgaggtgcttgggaaacacaccacccttccgcgtttccctgcttattcccgactgcccactccatctttatatctcccctgtcaacggagacagatgtactccccagcacgatgattttacattaaaccaaagagagtaaaatgtcaagaacgagacagggcgggccatgaatgcccggcaagccgccgggcgtactgttcgaggcagtaggcgaatgtttcgatacggagggcgagggagccgggggaatggttttcgtccatgtcgcggaatgtgaagaagggtttgtccgcgcatcggagaatggcttcgagaacggcggacaggggcgcgtccataccgcagcgaaaactggaccattcgactccaatcaggcggggatggcgcgcgatgtatttcgcggcccataatttgcggttgctgtattcggaaaaactgggccgccagacatcgcttatgccgagcgcgtcgggatcgtttccgaataacccgcgcagggcttcgtccccgatgggcagcgattcgatggtgagaatgggatagcccagccggtgaagggcatcccacacgccgtgggagatccccggatccacgtggtacggcctgccgagcatgaccaatgcgatgccccggccgggctcgagcgaatcaatcacggcgcgtccctttgatcgccatgcctcttggaaatcttcccatgcggcgaatgccgcctcggcggcgcgcagcgattcgcggcgggtcatgcccaaatcgtcgcgccaatcctcccacagttgccgcgcggccaggtgcggatcgccgatatccacaaaggtctttctcagttggatgccgcgttccgcgaaaaggtcgcgatcgcgcctgaacgcggcggtggcggcttcgaccgctccggtgcaggcggggcaggcccgggtggcgacgacaccgcgcagccatgtggggaaggtgtccatgatgggaaagaagacgtgggtcaatggggttttctcatggatgcgggcgatcagatcgtgaaggtgcgcgatggccagtttactcggataacacggatcgatacagccgcgtttcgcaccttcgcggtacattttttcgttgctgtaaccggaccagatcaggcggtcttcgggcacgcccagcgcgcggaaatagccgaggaaaaacggagccgcggcatacatattcagtacgcggggcattccgattcgtagtctctcgcgctgttggataacccactgtcccagccgtccggatcgcggtacggcaagggggaggccgggcgatcggaacgtttcgcgcgcggacaacgcggccaaattcaaaccggcgtcactattgtgcgcccggggaggttccgggcggtgtcccgatgcgcctttctcgcagggagcgatgatggcctggcgtttgctcccgttcacgcgcatttcgaggatggtgcggatacacgcattcccgcagccggcgcagcgcgtggagtcgtcgtgcctcgcatcgcactggatcgtttccaacgcatcgaacccgataaaggtcgaagtccgatgttgggcttccatccatcgccgtgtttccatggcgcacccgagggcgccggcttcgccgcaatgttcatgaatgcggatcacgggttcgattcccgattcccgaaactgaccccgaatgaaatccacctgcgccttgacggccgccagattgcgctggacgccgccctgcagcacaaagacacgacccagttggggcaggttgtgccgctggcacacatacagccagatgtttttcggtaggaccgcggcaagccccgcgagaatttcgccgggcgtccagccgtgccgttgcacatccacaattccggattgcagaaacacggcgcatccgtggggaaaatcgggcatgtggcgggccgaaaaagccgcgtcggcatagcgatcgacggaaatgcccagcattgcggcggtggcctgaagatagaagccgttgccggccgaacattgggtgttgaggcggaaatcccgcacggccccccgttgcaggaaaacgatcttgatgtcctgcccgccgatgtcgcaaatcacgtccgcgtcgggatgcgcgcaaagtcccgcgcgcatgtgggcgaccgtttcgacgatggccgtgtcggcctgcatgacatgccgcaggatttcctttgcatagccggttacgcctgcgccgagaatccgcaatcgagcgccggcggtttcgacaccttggcgcaactcgcttgcgacatgccgcaggtcttcgacgggattgccccccgaaagccggtaggccttggcgatgatgctgccttggggagtcatcaggaccgctttcgtgctggtcgaacccgcatcaacgcccagataggcctcgacgtccgcttgcggcaggagaggaggcggactccacgccgggggcgcgtaatcgcgcataaaggcttcccgttcggcatcatcgcggaccagtccagcctgtccttgcggcacgcggcgttcctccatgatccggcggagcggttccgttccgcggtaccggccaatggaaggatgggctgcgatcaaggcttgtccgcaacacacggcgccgattgcgccgaaaaacaacgcatgatccggcacgataatcaaccgtccgtccggctcgccgtccggaacgaaaacaccatggtcgcgccagcgacgcggcagatggtgacgccaacgctcggccagacccggcatgaatacatgcggcccgcccagcaggagaaccgtgggcggcaaggcctcgccgcgggcaagcacggcaaggttttgaagaacgatggaatcgaacagggacgccatgagttcgtccgacggtgttccccgtttttgtagactgatgacgtcggtttccgcaaacacgccacatttgcccgcaacgggatggattcggaccgttgcccaatttacagcctgtaaattgttgatgcacagaccggtttttaccgcgatacgatcaatgatcgctcccgttccgccggcgcatttgtcgttcattgacacggtcttgcgccggccgccgtgcggggtggtgtcgtgaaagacaactattttggcgtcttcgccgcccagttcgatgatcgtgcgcgtctccggatgcaggatctcggcagcccggcatagggcgctggtttccggcacgaaatgggcgccaatcgcttcggcgacggccgtgcctccgcttccggtgacgaagacatggaattcatgccgggggatttccggaaaggccgcttcgatatcgttcagaaaatcatggcataccgacgcttggcgcatttcatggcggcgatacgcggaccatgccacgtcgcggcttttcgccatcatgacgattgccttgacggttgtgctgccgacgtcgaggcctatggttggagacacggtcgtgtccccgtttgttaggcgttgtgccgcacgggacattttattgaatgcccatatagcgcttgataacggcgacggtctccgtgtgaccgttcatttcggcaatttccaaggggatttttcccgacgagttctttacgtaagtgtccgcgccccgggccagcagcaattcggcgatttccgagtagccgttccgtgcggcctcgtgcagcgccgtgaaaccggcctcattgcgaaacgtgatgtcggcattcttttccagaagcaatttgaccatgtcggtaaaaccgagtgtgcatgacagaaacagcggggttttgccgagatagagcgtgttcacgataccggggtgttcgtccaagagacggcgaacttcgtcaatcttgtttccaaacacgttcgacatcagggcattgttcaacgcggcgtgcgtgcgacccgtttcttcctccttggcctgcaggttatccaactggtcaatcgttccccggacgatgccgacattgctcttggcgcccttcgatcgcaggaactcgacgacttccgatcggtttttcgagagggcgcgatccagtggagtcttgccgcggcgatcggatgcgttgatatcggcgccgagcaccagcaagagttcgacgacatccttgtgcccgcagtatgccgcctcgtggagggcggtcatgccctcgaaatttttctcggtcgcggcaatgtccgcgccgtggccaagaagcaattcaacgatgacgcgccgcccctgccgggcggcgatgtgcaacggcgcaagaccctgttcgcgcatgttggccagatcgggacaatcttcaagaaatcgcttgacgccggccacgtccccgctgttgagggcggcgctgaaggcgctttcggtggccggacgcaacaatgcggccacttcatcgttgttcgagtcctgtgcgattttcaagggcgtgcgcccctcgctgttgcgcaggttgacattggcgccccgggacatcagcagtttgaccatgcgcacatgaccctgttccgccgcaatatgcaagggcgtgaatccgttgatgtctgcggcgttgatatcggcgccttcgccgatgaacacctgcacggggccccaatggccgtcccaggccgccgcgtgaatcggagaacgcccgttgcgatctttggcgttgatgtcggcgccgttggccaccagcaacttaaccaattgcacgtctccgcgttgcgcggcgatgtgaagcggcgttcgttgtgaaatgtcggctgcggtgggattggccccgtgtgccagcaggagttcgccgatgccgagacatcccttttccgcggccgaatgcagcggagtccattggttttgatcgatcgcattgggatcggcgcccttgttgaggagaatatccacaagatccgggtgcatggcttgggcggccacatgcagcggaatctggccgatgttgtctttggcatggatggatgcatttcgttcgagcaagacttttaccgcgcggctttgatccttttcgaaagcgctgaaaagcggggtgcgctcgttgccgtcacgggcttcgatgtcggcccccttgtccaacagaagggtcacgagataatcctgacctgcggccgcggctacgtggagtgcggtcgttccgtacttggtttttccttccaagacggcccctttttccaagagatattccaccacggcaatacgatcgggattcggttccggttcgactttttgcacccggctttgattccagatgtggcgcggcttgatccggtcctccatgacggcagtatgcagcgggctttcgccccgcttgtttcgggcattgacgtcggcgccgcgttcaacgagccgggccacggcgtcctttcgggcctcgcgggccgcgacatgcagcgccgtccatcccagtttgtcgccgttttcgaccgtcgcgcccgtgtcgcacaaaagttccaccatgtcggcgagtcccgcttccgcggccacatggaggggggtacggcccttgttgtccgtcgagaagacgaccgccccgttgtcaatcaaaaaggcggccatgtccttttgggcggcctgtaccgccacatggagcggcgtgaatccgtcttttcgcttggcgttgatgtcggcgcccagcgaaagcaacaaggggacaagttcgcggtcgccgtttttcgccttgatatgaaggatactgtcgccggtggcaaaaattcgctggccgatgtcggctccccgttcgacaaacagtttcaccacttcgccgttattgtgcagcgccgcgatgaagagcggggaatttccttccacgtccacctgggcgggatcgacgcccgcgtcgagcaggtattcggcgatttccttatggccgaacatggcggcggtatggagcggggtgcgtttgatggcgttttgttccgtggcggcggacggcttgtttccgacgatttctttcagcgcggcgagatcaccgtaggcggcggcggcttcggcggaaacatccgccccgaattcacgcagcagttttgccgcatcgtattgcttggcctgcatggcgatcatgaccggcagcgacagcttgttttcgtccgcgtcgagatccaatcgagcaccgtagtccagcaacagttcaagcatgggcagattgccggcctccgctgcgcaatgaaccgccgtatatcctcgcggatcccgtccgtccaagtcttccagacgcaaaatatggttttcggcatccgccaaatcgcctgcctttaccgcctcgaccaacgtaggatatttgggaggcggcaaattgtccggaggggtggccggccgtgttttggatggcatgcgtggtggttttgtgagcagggtcggcgtgggaagcgcaagcccttcgtcgccggattccgtaggggcgggcgcttgtggttgaaaaggcgtctgtgccgggttgaagaactccggcagcgtgcccgtcgccggagttgctcccaagggaagaaggcctgttgtggggccctggggacccgagagaggggcggccggcggttgggcagcgccggctgcgcctagcggaatgaagacggagccgtctccaccgcccgggaattgaatatccttgacccagttcatgtttgccggcggggtagacgagccggtcggtggcgttatggatggaaaggccggcgcgggtggcgcaggcgcaaggggaatcggggactccgggagagtggctgggggcgcgctcgtaacgggggccggttccgcttgcgcgggttcgggaagggccggcgatgtttccacgggattttcgggcgcggattccgctggcgtttccgtgattttcggttcagaaaggggcgcaggggcagcttctgtccggatctccgaaaatggttcgggtacagattcgacagccggagcaggcgcgggagtttcggccgccgggggaacccgcgtttccgcaggcgccggtgtgggatgaatgggcggcgattccggcgtttccgtgggcaaaggttcttcgccgacacggacttgcaacacctggatgctggtcaatgcgccgggagcgccgggaatttggatatccttcaaccaatccatcggttgttgcgtggattgctccgtctggtctgtctgcgcgaagaggagggggggtaataggatccccgcacatcccagcgcaagaagcgcagacagccgccgggatttccaaaaggcgcttcgtgccttcatgccaatcatccttgtgcctccgtggcgtcgtgccatatcggtgatttctttggtccgctttgtgcggacaaatggtttcccatcagggtaacgaattgcgcggcccgtccggcgacatgagaggccgaaggccggctccaacttgacaaatcattttggttttcctgtcccacgcaatacagcggacggcgaaaggcggggtttttcctgcaataagcacggatggcttccagcgaagcgccggatccggctaatgcctcctcgaattcccgttcgcagacctgtctggcctcgtcaagcgccgattgcaggcgactgtaggcatgtacggcgccatcgcccgatgtttctatcgaaacgaagtgaaccgaacggccctgccgggcgcagtaggccgcgacggccggttgcacgccgtcggattgggtcgagggaaggcatccgaaaggttttacacttatgaccagatgggctttccggtacaaggcgcaatagagggtcttgccgatttccatgtggccctcgcctccgacaatgtgcgtgttgaaaaagggccttgccagtttacgcagcattgcctgcggaatttgaggatgcgggacgcctcgcagcgctcggcgcatccgttcgtagtcgcggttcaacagccatgccgtcagacgcaaaacggccacgcctttccagtcggccgcgcgcgaccgtgccgcggtgtccctggtctgcttggtcgtgccgccgcgtccatggcgaaaacgttgcgccgcgacgtcaatcaggtaattgacccatgtcatgaccggttcggcggccacttccgcgccttcggattcgagaaactcgaacaggcggtaattgccgtcgccttcggtaagttgcgcccaaaactcgccggtgactttgcaaaggggcttcgggcgcgtgaaatccacttcgatttcgcgatcaatcaattccgcgcagcgtgcgagcgcacttacaagcgtgtcgtcgaacaaccggtgcgcaatacatcgcgccgaatcgcgatccagccccgggattcggcgacacagcgcgcctcctatcagcgccgtcagccagcgcccgcgtgttggcgcggccatggtctgcctgcgaagcgcatcgcatacgatttccatcactttcccaaacgtgcgttccgtttgtccggggacgatttcatacggacggatgcgcatggcaaggtcgttgagcagatcccccaccatgaggcatgtgatgaagcgttcagcgaaccgggcgttgagcggaatcgcgtcctcctcgccggactgtttcaggccgcctttctcttggaacaaaatgacccggaatccttcgaatccgctgttgcgcagtgcaagcccgaattcctcctcgtacatgccaaaccggcacgggccgcacgatcccgccgtgacgaatacataggcatcgttgatttcgcgcggcgtaagaccggtttcgtcccgcaaccggcgcaagcggtttaccagtgcgccaatggtgaaataggccgggttgcacatgcccgggttgcccagttcgcgcccggttcgataatccgcattcgtcggcgtgggcagggcttccgatcggtagccgagcggcgcgaacgccgcgcccagcaacacgccgtgccgctccgtcaacccgccgtacaagacggtgacgcgatcccgttccgcgcgcgtgaaaggacggcattcgctccttcggtaatgtgcagcatgtgtttgatttgcttgcccttccatcatgcgggaatgatgccatattgccccgtttcggaacaatgacgccatatccccttgtcttcttttcctggcctcattgctgtccaaaagaattgtaaaaaaccacaaaaccgcaaggagccacgttttacctttttattccgttcatcggttcgatatctgcgactatctgcgtcatctgcggaaaatcacatgatccacagatggcgcagatatacgcagatggaaaacagggcacggatgttcgggccaggcgattccgaactcaaatctgcatgtcagagcggcccaaaatacgattgatcgggaacacttcttcttcatcgcgaagaaaaggtgtcccacgaacgctttcccggaaaaaacgttgtctatttactcaaaatggctttctgcaagccgacatttggacagagatgtcctggccgaaaaaagcacgcctaatccggaaaaatcttttattgccgccggacgggccttttcaagtatgatgagggtgtgcgcggcatgcgcgaatgattcggccacaaacggagggagagttcgatatgaacaagacaccggtatcacgcagggattttttggcggcgtcaagcctggcgctgggcgcgggagcgatgtggcacggttcggccatgggcgccaacgaccgtatcaacatcggcatgatcggtacgggcgaacgcgccgggtcgcacatcggcgatctgggcaaattgcaggaatcgcacaatgtgcgcatcacggcggtttgcgacgtgtggcggctcaaccgggaagccgcggcggcgagggtcaagaaattgtttggcaagaagcccttcgagacgtcgcgctttggcgaagtgctcgcgcggagcgacgtggatgcggtggtcatctcgacgccggattttgggcatacgccgattatgatcgaggcgttgaaggccggcaaggatgtatacgttgaaaagcccatgtcgctgacgatcgaggaagcgaatgaagcgttggatctcgcgcggaaaaacgaccgggtcgtccaggcgggcacgcagcgccgcagcgagggctgctggaaggccgcgcgcgcctttatcgcgtcgggcaaactcggccaagtcacgcgaatctcagcggcgaacaatgtgaacgagccgcgctgggcgcgcaagttcgacgattgcaaggaagaagatgtggattgggacgcctatttgttcaaccggcccaaggtcccgttcgatccgcgcctgttgcgccgctggcacttgtacaagatgtgcacaaacgggatttcaggtctttggatgagccatctcgtggatgccgccgcaatccttatgaatgcgtcctatccgaacagcgccgtcgcgctgggcggtctctacatgtggaaagacggccgggagcatacggatgtcttccatgctttgctcgattatccggaaggattcttgttcgattggtgcatgggcctgacgaattcagcggggaatcattacaccgttcacggtcgtaacggcacgctggagccggagaaactggcttattccggagacggcggggccggtgatcaaaaactcggggagggcaaactcgaccccgtgccgaatgaagaccatgtggccaactgggttgactgcatgcgctcgcgaaaacggcccaatgcggacattgaatttggccatcagcatgccgccgcgacgatcatggccgccaacgcgctcgagaccggccaacggatgcggtatgaccgcgaaaagcgaacgatttatcccggttgacaaaccggacaagccgtaacgggaacgggcaggattcggaatcgggaggcggcatggaaacgcaggcagcggtgcggtttcttcaggaacgcgtggcgcttttcgatggctttgacgccgggcgcttgggcgcgcttgtcgaaaattcacgttttgtttcctttgaagagaacgaatcaatcatcgaattcggcgaggaaggacgcttccttggcattctattcgacggcgaggccgaaatatcggtcatgaacgatgcgggcgaccgtcgcacgctggccctgctcgagccgggtaatctgttcggcgagatatcgctcatgaccgggggcaaaaccattgccgatgtcattggcaagacccgttgccgggcactgctcgtcccgcaggaggcgttcgcgcggcttatcgccgtcagtccgtccgccattcaatacttgtcgcggcttattattgatcgtacccgcgcatcggcctacgaggagcagaagtcgcagctgaatgctgccgcgttgcgccgcagcgaagatccctatggcctgcgtcttgccacggacaagccgatgaaactccttgtggtcaactgcggtagttcgtcgcttaaatacaatctgttcgacacaacggacgaggcgggcaatgcacatggcgtcatcgagcgcattggccaggaaggcacgcggcatcgccgtcattccgcgcggggcgacgacgagacggcgttgcgggccgccggtcacggggaagcctttgcagccatgatcgaagcgctcaccgcgccggatacgggcgtgctcaagtcgctcgacgaagtgtcggcggtgggccatcgcgtcgttcacggcggcggacggtacagccatcaggaaatcatcacggacgaggttctcgccgaaatcgagaaggcgtccgcgctcgcgccgctgcacaatcccgtcaacctgatcggcattcgcgaagcgatgcgccttttcccaaatatcccgcatgtggcggttttcgacaccgccttccatctcaccatgccgccctatgccttcctgtacggccttccctacgagtatttcgagacgaagggcattcgccgttacggttttcatggcgcctcgcacaaatacgtcgccatgaaggccgccgaatttctcaagcggccgttcaatgaactcgaaaccatcgtgtgccacctcggaaacggcgcatcggtgtgcgcggtggatcacgggcgatcggtggacacttcgatgggcatgacgcccgccgagggattgatcatgggcacccgttgcggcgacattgatcccgccgtcctgattcacctcatgaaaaccgagggccttgacgcggccggtcttgaaagcctgattacccgggaaggcggtctcaagggcctttcgggcatctcgaatgacatgcgcgagatcgaagcggccgccgatcagggcgatcaccgcgccctgctcgctctcagaaccttcagttatcgcgtgcgcaaatatatcggtgcgtacgcggcggccatgggcggacttgacgcgcttgtcttcacgggcggcatcggacaaggcagcgttggtgtgcgaagccttgcctgccaacatcttgccggtatgggcatccgcattgacgagcggaaaaaccgggaagccgacggattcacgcgtgtctgcgacatcggcgcagacgattcacgtgtccggattctggtcattccaaccgatgaagaacgcatgatcgcacgggaaaccctgcgcgccatcgaacgccggtacgttaccgaaatcatccgggcccagaggcccatgccggtccccatcgaggtttcggcccaccacgtacatctcgccggggaacatgtcgaggcgctgttcggccaaggccgcacccttacgccgaaaagcgatctatcgcagcccggacaattcgcgtgcgaggaacgtgtggatctcgtgggacccaagggccgcgtggcgggcgtgcgtgtgctgggtcctgtccgttccgaaacccaagtcgaaatcgccctgaccgagcaattcaaactcggcattgacgcgcccattcgcgaatccggggatttgcgcggaagcccgggtgtgaaactggagggtcccaacggatccgttgaactggagcagggcgtcatctgtgcgctacggcacatccacatgacccccgaagacgccttacgcatgggattacgcgacaaggacgtggtctgcgtgcgcgtggagggcaaacgtgaactcgtctttggcgatgtgctcgtccgcgttagcccgaattaccgccttgcgatgcacatagacaccgacgaggccaacgcggcccacatcggcgccggtgcgacggggttcgtggacgccatccagagcaggcgatgacgcagtggcgggcgcgtgttttacggccttgaaccccaagacgacatggcctatcataagcgtgtaaaccggtggcatgggatccaaaaaagccgggcgcgtgcgcccgatgctggggagtagccgatcgatgagtcagaaaattcgtatcgaattatccatcatgatgttcatccagttcttcatctggggcgcgtgggccgtcacgatgggaacctacctcggcaagatcggctttacgggcgcggacattggcaaggcgtacagcacgacggcgtgggcggccgtgttgtctccgtttttcattgggatggtcgccgaccgttttttcccggcgcaaatcgtgctgggcgtgatgcacctgcttggcgcggggttgatgttctgggcctccaccgtcacgacgcccggcctgttcttttgggtgctgctcggctatgcgttgtgctacatgccgacgctggcattggtcaatgcgatttcattccatcagatgaccgatcccgccaaggaatttccctcggttcgcgtgcttggcacacttggctggattgccgtggggtgggtgatcagcctgatgaaggtcgaagacacggcactgccgctgcaaatcgcggcgggcgcttccttgctgatgggcctgtattccttcgcgttgccccatacgccgccgaagtccgccggaaagaaaatttccgtcagccagattctgggtttgccggcgctcaaactgatgaaggagccgtcctttgcggtgttcgtcgtcagttcgttgcttatctgcattccgcttgctttttattatagtttctgcaatccgttcctgaacgaaaagggcatgccgtatccggcgctcaaccagtcgctgggccaggtgtccgaggtcctcttcatgatcgtcatgccattcttctttgtccggctgggcgtcaagaaaatgttgctgatcggcatgctggcatgggcggtccgttacgcgtgttttgcctatggcgcggcgacgatgccgttgatgggcctttattacatcggcatcattctgcacggcatctgctacgacttcttctttgtgaccggccaactttatgtggacaagaaagcgccggaggaaatccgcgcgaacgcgcagggtttcattgcgctggtaacgtatggcgcgggcatgattatcggatcgaatctttcaggcatgattgtggacaagtttacgacgttggatgcggccggaacgctggtggcgcgcaattggcagtccatttggctgattccgggcggcatggcgctggtcatcgtggtgttgtttgccctgctcttccatgagcggaacggcgccaaggcggagaaggcgtaaagctgagttggcgagagcaaaggacgaaaaggacacaaaggacacaaagggctttcgttgtcggtgaggagtccttttggtccctttcgtccctttcgtccttgggcgtccggccttgaaggcgcccgttccagcgagaacggcagggaaggaatggtcttatgaaagcggcaatcaaccaatgggcatttccgaatgacatgcccgcgcaggaagcgctggatcgtgtgaagcgcgcggggttcgatgcgttcgagatctgcggcgggcccggcgggccggtcaaactcgatgcgaccgaggccgaaatggccgcgattcggcgacatgcggattcgattggcattgggttgaccagcgtcgcgtcgggcgtcggctgggactattcgctgtcgtcgcccgatccggcgatgcgggaaaagggcaaggaagcgattgcccggctgcttcaaatcgcgaaatggctgggtgtggataccctcctgacggtgccgggcgcagtaacgccggacatatcgtatgacgcggcaatcgaaaacgcgctcgatgccatccaaggtctcgtacccgtggcggagcgcctcggcgtgtgcatcgccatcgaaaacgtttggaacaagttcttgttgagtcccgtcgagatgcgcgatttcatagaccaattccagagcccacaggtcggcgcgtatttcgacacgggaaacatcgtggcatacggctatccggagcagtggatacgcattttgggcgatcggattcggatggttcacgcgaaagactttcgggcctcgaccggcaacatggacggctttgtgatgttgcttgaaggaaacgtgaattggccggctgtgatggcggcgtttcgcgaaatcggttacgacaaggcgctcgtcgcggaatacggcccatactcgcattcgctcgacgcgatgctcgcgcatgtacgcacaagccttgggacgattatcgaactttgaaacagccgtgacccgaagggcataaaggccaaaaggacctgaaggattaggaagacactgcagggtgggtgacgcgaagcggaacccaccaaatgattggggagtcgtgagaaatgaatgtggcgatagtcggatgcaacggaatgggccgtcatcacgcacggatggcggcgaattgcgggttgcgcatcgtggtgtgcgcggacgtccagaagcccattgcacgggcgctggcggatgcccatggggcggattcgatgaccgattgcctcgcggcggtggagcggcgcgacgtggacattgtcgccgtcacgaccccaaccccgacgcatacgttttacgtcgcggccgccgcgagggccggcaagcacattttctgcgaaaaaccgttcgggcgcacggtcgaacaatgccgggaggccatggccgccgtgcaaaaggccggcgtcaaactgttcgtcgggcatgtggtgcggtatttccaggaattcgaggcgatgcgcgcacaagtcgaggccggtaaggtcggcaagcccggtttcgtgaaattgtaccggggcggaatctttccgacgggcgtaaacggctggtttcgcgattattcccagagcggcggcgtcgcgttcgacagcatgattcatgacctcgattggctgcgctacgttttcggcgagccggaacgtatcttctgccaggccatccagcgcagcacgccggaacatcttgactatgccatggcgaccgttcgcatgaagagcgggctgatcgcgaaagtcatcggaacatgggcccatccatccggtttccgtgtcgaggcggaaatatgcggcgacaagggcatgattcagttcaatagcgacgaggcgccgttgtttgtggcgcgacgcaacacgggagggggcgggccgggcatgatcgtgccggccagcccggtgccggtcagtccctacgaactcgagtggcgtgattttctgtcatggattgaaggcaagtccgccgcgcgcgtgacgccggaagacggactcgcggccgtccggatggccgccgccgcgctcaagtcagtcgaatccggcaaaccggtcaatctctagggaggatgccgtcatggccaaagtcggaattatgagtttcgcccacatgcacgcctatagttacgcggcgtgtctaaatgaacttcccgaagcggcgctcgtagccgtctgggacgatgacacgaagcgcgggcgcgccgccgcccgccagtttggcgcggcgtttgtcgcaaacatggacgcgtttctcgcgtcggacattgatgcggtgattgtgacgtccgagaacgtgcggcatcgcgaaatggtcgaaaaggccgccgccgcgggcaaatggattttgagcgaaaagccgctttcgccggacgtttcggattgccgcgcgatgatcgccgcgtgcaagaaggcgaaagtgggtcttggtacggcgttcccctgccggtattcgccgccgctcatggaagtgaagcgaatggtatcctcgggagactacggcgccatctatgcggtgtcctgcacgaacaacggacaatttcccggcggctggtttgcgaggcaggccatggccggcgggggtgcgacgatggatcacacagtgcacgttgccgatgccctgcgctggattaccggaaaggagttcacgaaggtctattgcgaaaacggtaatctgctgcgcgaaggcattgacaccgacgacatcggcagccttcacatggagatggaaggcggaattcaagtttcgcatatcgcgtcatggaatcgctcgaaaagttttccgacatggggtgacgtgacgcttgaaattgtcgccgaaaaaggtatcatccgcgtggacgcgttcaatcagaagatcaacgtctataatgacgaggccgtgcgggcggaatgggcctactggggcggcaatcccgatttgggacttgtacgcgacttcgtcgtggcctgtgacgaacgccgcgaacccgctgtcacgggtctcgatggcctgcgcgcggtcgaagtgaccgtcgcggcctacaagagcgcggcatccaatcgcgtggccgccgtgtgaggcggacaggagcacaggagatcggatgatgaaacatatacaacgggttacgattccgcggatggctgtcgaatacaaggccgaggtctacaaacaggactcgtttttcgcgccgtttgtcgcggccggcaaactggtggcgcttgtcgcgggggcggtcttcggcctttcgtcgctgctttccggattccgaaccgaattgtaacgcccttgcccgaatataaaggaaatggccggaagaaatcggatcttccggcccatttctcagcgacctcttgcgccattgagatcacaaaaaatgatggcagcccgctgggcgcggggcattgccggcgtcaggccaaggcggattttcccgaggatgccttgtcgcggtgatcgctttcatacaccagcagcgggtcttcgtgattgagtatcactccgggcgtgatgacgcattcgcgcacgtcgttgcgcgagggcacgtcgaacatgacgtcgagcatgatttcttccagaatggatcgcaatccgcgggcgccggtgttcttggcaatggcgacatccgcgatggcctcgatggtctcatccggaaaacgaagtttgaccttttcgagttcgagcagtttttcgtactgcttgacaagggcgtttttgggttcgaccagaatgcggatcaggtcgtttcgattgagttcgtgcaaggttgccaccaccggcagacgtccgatgaattcggggatcagaccgtatttgatgagatcttccggttcgacctgctcgagcagttcgccgatgttgcgctcgtttttcggacgaatatcggcgttgaaaccgattacgttggtgcgggtccgccgttcgatcaccttgtccagtccgttgaacgcgcccccgcagataaaaaggatgttttgggtgttgaccgagatgcattcctgctgcgggtgcttgcggccgccctgcgggggaacgttggcgacggtgccttcgaggattttgagcagcgcctgttgcaccccttcaccggaaacatcgcgtgtaatcgagggactgtcgctcttgcgggcgattttgtctatctcgtcaatgtagacgatgccggtctcggcgcgggtcggatcgaattccgacgcctgcaagagtttgagaatgacattttcgacgtcgtcgcccacatagccggcctcggtcagcgtggtcgcgtccacgatcgcgaacggcacatcgagcatccgggccagactctccgccaacaacgtcttgccgcagcccgaggggccgatcaacatgagattcgacttctgaatctcgaccccgccgatgacgccccccgccgcaatgcgcttgtaatgattgtgcacggccaccgaaagaatgcgttttgcgtgttcctgaccgatcacatactgatcgagaaacgacttaatctcaccgggcgtcggcacctttaccgaacgcttgaccttgcgctggttgcgttcctcggccacaatctccgagcagagattgacgcattcgtcgcagatgtttacatcgggacccgcgatgagcttattgacttcgtcgtggcgcttgccacaaaaagaacatgcgggaatctcgttgcgccgatttggaggcattcgattctccttctaccaatggaactatcggtcatggtatagcacttttcggcgtttttgtcaagagttttctttccgccgattaccgtaaccgcctatattgtgccagccgacggggttgcccgtcaagaaagattcgggcatccacaatctgcacgctacgggaagtcggcatccttgccgaccggtatttacgcaaagcccctctgattttgccggtcaacccgaagtggcgcgcgaggacatgcgccactcccaaccatcaagagcctcgcgatcatgtctcttctactgaaacgcggccggtacggcatgaaacgcacacagacgcatcttacgtgcggaccgcggacaatcccgctttccatgaaatgggatccccgccgtgggcgagaagttgcatcaatttgacacgtccagttcgttccgcaaatactgctgcctcaatcaggcaaccggcaaggaggaatggcgccatgacggatttcacgaatggcaatggacgcgtacccacgcttcatgtggtgggtgattcaattccgcaggcctattttcgggccatgaaagccgtttgggaaaacggtttggccatccggacggaatacgaccgcaaggacaattccggttcgtatattgatccgccgagccgcgatgcccgcgttttgattgaagtgaaggatccgtttgcgcaaccgcgttttcctccgatttcgttttgcgaaattggcgtatatatcgccgaaatcatgggactcaaggattaccgggtcgttccgttcgacaagcttcgcgaggcggttcatggggaattgtcggcgcaggaatggccgtacacctatcatcagcgacttttcgcgcatccctgctcggatggttcgacgcttgatcagatggccttggcgatcgaacgcgttgtaaagacccctcattcccgccgggcggttgcctcgaccgccgtgccgacagtggacccgtttttacgggaggatatcccatgccttcgcgaggtccaattgcgttgcccggaagacgcggacggacgtcttgtattgaatatgaacacgatgtggcgatcccgcgatctctacaaggcatggggggacaacgtcattgcgattactttcctgcagcagacgattgcgcggacaatcgcggcggcttccgggcgggaggttcgcgtgggcagttatgcggactacagcggcgcgcttcacatctacggtcaggatttcggcgcggtcgggggcgacgcggagcgcggcctgcacagtttcttcgagactttcgacgaggaggcattcatcgcgcgatcgctgaccagcgagatggcccgcgacatgcttgtgctaccgcaacttcaaaacctgctgacggatcgtcagcgggaacaatggggatttcctcctgaatccattgcgctgctcgaatcgctgattcgcgacatcgaaaacggcgattgcatggtgtagcggcaggcaattgaaacagtggatggttccagacggggttgttgcgttcaagggcggttgatatcgcgattcagacgtcgtttgggtggcttttcgcgaaaacgatgtagcggctggcgaaaaaattgaagatgagaccggccaggatgcccataatcgaagcgatctgcggaatgagggcgggccagagcgacaacgcgccgagcgttacgccgtaattgaccacggcgccgaccgagctggccgcgataaagccgaacatttgccgccaaaacggcccgcggccggcataggaaaacgtgaagcggcggttgagcaggaaattcgtgatcatcgaaacaaggatggccacggccacggccgccttgaggggaaccccggcccataactctacggtgagcacggccaggttgacgaccgtgccggaaagaccgaccagcccgaattgaacgaaatgcgaccagttgccataacggtaggtatagagccgccggacgtgttcgagatagcgcaattgttccttgaacgaaagtttgctttcaccgtgggcgcgcttgctgaaatggatgggcacctcgcaaacgtttttgcatccgcacttgatcaacagttccagggcgattttgtatccgacgggattcagggcgtccgcccgatcgaaggtctcgcggcgtatcgcgaaaaatccgctcatcgggtcccgcacggaggtcagcggcagggcgaaccatgtcgccacccggctgtttatccagcgaaacaggccccattggtcgtccgtcgaaccgccggggacgtaacgcgaaccgagcgcgaaatcatggccggcatcgagcgccgcgatcatttccggaatcttttcgggcgggtggctcaggtccgcatccatcacaagcagcgtgtcgccgcgcgcttcgcggaatccgtcgagcaccgccggactgagtccacgattcgccgtccgaacgacaacccggacccagggtttgttcagcgcggcgacggcctcgacgatgccgtcacggctgtcgtcgtccatgaaaacgacttccaaatcaagcgcgcaggtctcgcgaacgcgttcgatacgcgcgatcaattccggcacgttggccgcttcatgatacgtcggcacgatgacggagagagtcatggatatcccttggcaggctgtggtttgaagactctaggcggatcgacatggaggaagcggatagggcggcgcgcatcatctcttgcctttcagccgtatcattcacccttcatccttctcgtcttagcggtcgcgcccggattcggccctgagcctttcgacaaacggtgttgaaacggaaccgcccgcggcttcgatacggtgcagttcatgccatgccgcattgtaatcctttgtatcgaataacgccaccatgaaggggcgccatgcgccaagaaaaacaggatccgccgcaaaggccttttcgagacgggcgcggcactccgtaattttgttctcgatgagatccacaatggcaaggcataggtgggaaagcgcatattggggatccaatcgcgcgcattcctcgaacgtttttctcgcttcgtcgttccggcccgaaccgagttgtccgagacctgaaagaaacagatccattgccttccgggtcggggcgggatcgcccttttccgcaagcacctgggcgagccgcccataacgtatgcccagatccggattcaactcgccggcacgccgaagcggcgcgaccgccgtatcgaaatcatgggcatcggccaacgccatgccccattctgaataggcgatcgcatagccgggatcatggcgcgtggccttctcgaaagattccgcggcggcgcgcaactggttgttctggcgatagccataaccgtccagcaaggcccggatcgccgcggcgggtccggatatctcgttgcccgattcgatggcgcgcaagagatttccatagatgtcgcgggtaggcgatccggccgatccgatgcccggaatgcggtggagggcctgtcgcgccgtgtcgcgatcgccgtgttcggccagcgccacggcaagattgccatatccttccatgaaatccttcggatcgggcgggcttttgccgtccacgaccggcttgccggtggccgtgatcgcgtaggccaggacatgttcgataccctgaaattcctttaccctgtaccgcagatttcgcgcggccaacagcgcgtcgagttgtttgtgtggtcccgaatcgaaatagtccaacacgaccaccatccagaccgtccgctcgcaaggacgcgacgcgtcgccgcaaccgtaactattcagcaaaaaagccgcctgatccacaagcgtttcgatggtttcggcggaagataccggattggcgcagcctcccatgttgaacagcaacacgtccttccagatggaaacttgcaccaaaatcggttcgccgggcttggcctcgtgtttgagaaatcggcccgccgacagccagtcggtgcgctgaggtcctggaaaaagcattgcggtctggcaggccatcagggccgcacacgcaatcgttcccgttgtgcgcatccaattccggggcagcgccgctatcgcgcctccgatcagcacgtaaagccccagcgaactatagaccgtgtaccggggaaaaatgcacggacgccatgcaaggcttgccgcatacaggatgaccggcggaagcagcaggaacaggataaacaacagtgttgtccggtcgcgcggtatgcgccttgcgccccaggccagcgccgcgcccgcgatcgcaagccatgccagatcgaacaacggatggagccgcgcccatgcgcgcatttgcgcggaggggcgcatttggtaagtcagatggatcgcatcgtccgcaaaaacatcacccaggaattcaagaaatccgggcgtcttttgccaggaagccgtctgttcgggcgaccagaattggatccctgcgacgtatagcaggagcggcgccaccatgatcgcatgcaagccgcaccatacgaacaggcggttgatcggctgccggtgggcgagcaggagataaacgccttcggcaaacggcgccagtaatccgaaggtatggctccacatcagcaggatgttcaggagcacatgcgccgcccaccaaggccactgtcccccgcgcaaaattcgaagcagggtgtagagcgaagcggaggccagcaacgccaccagtccgtacatgtggatttcctgtgaaaaatgccgatgaatcggagacaatgccacgagggccgccgccaacagccccgcaaccgggccaaaggccagcgatccaatcgcgtacatgaccgcaatcgtcgcaatgccgaaagccaccgatgccaggcgcagtccgatcggcaaaggacttatgaatcggccccaaaggtattcgaaggcgtcgtaaacgggcatggtcgccgggtcgagtgtatggttgatgcgcagaaatgcgggcaggcttggcgcgtcgagatacttcaggctcgtgtattcgtcccaccacaccgattccgcgcgaatgccgtacaggcgcaatgccagcccgcccagcagaataatcgccaggatcaggcctgtgtatcttcgggacgtttgttccatgtcgccaagatccgtgtttgccggacagtataggatattcgggggcggacaacgaattcggcgggccggggatgcctcgactcgaatgcgacattcagtcccctttcgtgctcgcgctcgtgcccgtaatcgtgctcgtaatcgtcatcctaacgcggctcagccgcaaggcctcaatcaaggatatgatttctttgtccgcaacttctgtgtcccatgcacagaagttgcggacaaagaaactaaggctcttccggttttggcgatcttcagccccccttcgataataggcgccctctgtagtagggtcattgtggcaacaccatgagattcgacacggcaggcatcctcgtcgggaatgggcagcttctgtagcggggatggattcatcgcaagacgccgcgagtattccatttccccggaggggaaaaacacgaatagccgcgggtgataacccgcgggacgggatcgtggaagatgaccctgaaagggtcgaacgtgaaagggtcctccggtacctaattgttcaacccgttccgggttgaccgctggatgatccggttccgtgggttgacacccacggctattcacgtttcggcccctgccggggccgggggccaccgtcaatcgggggcgttgaaggaataggggacgtctcacgtcatgaggccggtccggacacgcccgttcaaccggatcagaaaagatcggaaaaagcggatgagccgaaactaatcgaagatcgcggatccaagtttttgttcccaacaatcaaggaccgatgacggacagacatcggctacccgtttgatcttgtctcgttcgaatcagtgggatgcgagcagcgcacgagcaagacgaggcgcacatacggaccaaataggttttgagatttccggcacaacaccggacgcaatccccctgatccctatacgtgatacgtggcgtgttgatgcagtgcggcattcaaggtattatgaattgcggaagataaccatggattctaaaatcaaaatcgtgatccttgtatgtgtactcgttcttgcggcggtgattgacgaaacggggcatgcggaagaaggcgacgccggaaaagcgccgatggcgctttggacgttcgaggagccggtggaagcgcttcagttccatggcgcaccggataagacggtttggacggccaagaccgatcaggcgatcgtgcgccgcggaggcgtgcggggctatgcgctggatttgcgaggcaatcacgcaatccgggccggcgctttcgatcggtcccggatgtccgctctttccatcatggcatgggttcgcccgttggaccttacgggtttccgcgaaattttccggcaggagagcgacgaccgtgtgctgttttcgtttcaagatagcggaaacatcctgtcgctgggcttgaatgtaaacggttatgtggaatgcgacgcacgcatcgttccaaaacagatcctcgacggcacatggcatcactgcgccggaaccttcgacggccacaccatgcgcgtctttctcgacgggaaggaaatcggcgtcctcgaacggccgggattgatcgcgttgtcgcccggtttgccggcgttcattggttcaatgggcggaacaaacgagcattttcagggcggcctggacgagttgcgcctctatgacgtcgcgctgggcgcggaagaaatcatggggcttttccgtcaagggctggcgtccatttcggaaaattccaaacggctggacattgccgccgggaaactctacgtggaggcgccgtccttttccgaaaccgtggccaacacgcgcaagaacctccgtatgcgcggtcccgcggccgatccggacttgacggatgcgcttggggcgagattgcgcgccgcatttccggacgaatgcgccgcctttttcgagtggaccggcacaaccgccggcgcgcttctgtcccaggacgaatcgtcgaacgaagcgcaggcacggcggcttatcgaactcatgctcgaatataaaccgctgacggaatatcagaagcaaaagcagtcgccggaagatcgcgcgaaatgggacgaggcggagcgtatccgcgatcggtttgaacggttgtcggcacagggcgagtcggctcaaagttccccggaatggttcgatctgatgttcgacgccgggcgtcgaatcgcatttcgtccccgcgtgtacgagcccgtcgcaccctatgtaaaacccgaaacgcccgaaacgcgaaacttgaccgaagacgaggcccgggtcgcaatcgaaagcgactggatgcaccaggccgatcaaaatccgacaccggaacgcattcgcgatgaaatccgttgggcgcgtgaaatggctgcgcatatccaagtggacgtttccgaaccattggcccgattggacatgctggcgaaaaagattccggggaaaaccgccacggaactttgcgatttatatctggccgtgcggatggcaaaacgcgaaatcatgttcaagaatcccgtgatcgatttttcgcggctgctgctggtggacatgccctatccgcagggatccgaatggcagcacgagacgcgccatcgtctcggttacatggccgtgcccggcgcgcggctgatcatcctcgatggactccatccggcgggaaatgtcacgcaactgatgccccaaccgccgttgcatggatcactctggcggcccgacgtgtcttttgacggcaaaaaagtcctgttctgtttcaaaccgcacaatgaaaagtcgtttcacatttatgaaatcaactgcgacggatccggcctcgtgcagttgaccgatggggtctacgatgacgtggatccgatctatctgccggacggccatatcatgtttgcgacgacgcgcggacataattacgtccggtgcatgccacccaccaattcgttccaacttgcacgggccgatgcggacggtgggaacatttatctggtttcgtacagcaacgaacccgactacctgccgtccgtaatggacgatgggcgtgtcgtctatacccgttgggagtacacggacaagcccctgtggcgcgcgcagaaattgtggaccacccatcccgacggcacgcaggtggccacgttctggggcaatcagagcgtctggccggatgtcatgaaagacgcgcgcaatattccgggcagtcgccgcgtgatgttcaccggcagcgcccatcacgattggtttgcggggtccgtgggcattatcgatcccgacaagggcctcaattttcccaacggattgaccaaggtcaccgccgatgtcgagtggcccgagtgctacaacggccccgtcgatcccgtcgagtcgccaagttaccacgtctcaggcaagtatccggcatactactcgccctacccgctgagcgagcgtgattttcttgtatcggcgcaacgcgacggaaagttccggctctatctgatggatgtggacggcaaccgcgaattgatctatgagggtgtccacaacatttttcatgcgatgccgctcaagccgcgcgcgaaaccgcatgagatcgtggaccgcgtggcgtggccgtcccgcggggagcgcgataatcccgcgccgggcgtgctgttcagcaacgatgtctacaaaaatgcgccggaagaactgcgcggtaaggcgcggtatctccgcatctggcagatagacgccaaaacgtacacctactggcacaagcgtccgtacatctcgaccggccccgtggtgtccgccgtgcagtccgaaggcgtgaaacgcctcatcggcaccgtgcccgtcgaaagcgacggatccgtctcatttacggctccgtcggggcaggctttgcactttcaattgctggacgggcattttcgggccttgcagacgatgcgcagtttcgtcggcgtgatgcccggcgagagccgggggtgtctgggttgccatgaatcgcacagccgcgcaccgggactcggtgaaaaatccatcgcgggcagcgcgccgccgcgcgcgattgaaccgccgccgtggccggacaccaccgtcagttatgcgcgttatgtccggcccgtgctggaccggtactgctcccgctgccacgagggggacggcgaaggccgcaagacctttgatatgaccgaacggcccagtccgccggtgttttccgaaccgtacatgacgttgatcgggcgtccgacgtggggtgcgccgtatacgccgccggaaaagcccgtgccgggcttcggcatcgccggggtgctcatggtcgaagcgttcgatcagcgcgatccgaaggcctatgtgacgccgaaacccatgacgagcctttcgtacaggagtccgttgattgaaatggtgtccagcgggaaacaccatggcgtcgttgtggatgagacgagtcggcaacggctcatcgcgtgggtggatgccatgtgcccctatctcggcgacgaggaagtacgggccatccccgatccggaattccagggcgtggactggctggccatccggccccggatcgcaacggcgcccgttgtcgtgcgtcccggtccggtggatgaagacgccaaaccgcccgcatgaccgtcggcatgatgaaaaccccgtgagaagacaacgattgacgattacgataagccggcacgataaaggaggctgcccgtgagtttgattattggatgtctggtatgtggaatcggcggcgcgacgacgccgctcgtggtggtgtcgttcaacttgcgttacggcacggcgctcgatggcgaaaacgcatggccgaaacgccgggaattgatggtcgaaacgatccggacaatgaatccggacatcatgggaacgcaggaatgccttgagtttcaggcgcaatacctcgccgaggccatgccggaatatgcctggatcggcgtggggcgcgagacggacggcaagggtgagatgagcgcgctgttctaccggaaagacgcgttgacggctgaggaatcgggccattactggctttccgaaacgcccgaagtgcacggttcccgttcgtggaacacgagttgcacgcgcatggtcacatgggcgcggtttcgccatgccgggacaggggcggctttccatgtgctcaatacgcatttcgatcacagaagcgaagaggcccgcgtccaatcggcccggctgattgtccagcgcttgttatcgctgccgcgggaaatgcctgtcattctcacgggcgatttcaacgccaacgccgaaacatccgccgcatggaaaatcctcgttgagggcggattcaaggatgcgtgtctcctggccggggaacgtctcggtcccgacgtgacgtttggcggattcaaagcgccgcccgacgtaaaacagcagcgcatagactggattcttgtccgaaatgccggcagtgtgcagcggtatgaaaccgtcacgttcaacaaggatgggcgctatccttcggaccattatcccgtttccgcggtcatactcattccggggacgccgtgaaaccgccacagacagaagatttcctgccgcgcggattgaccgaagcggaagcccggcggcgtcttctccaggaaggccccaacgaactctccgcctcgaaaccccgcggactggcgacgatcgcgttcgaggtgatccgcgaaccgatgtttctgttgctggtcgcatgcggcgcgatctatctggcgttgggcgatatccgggaagcgatgatgctgttggggttcgtgttcgttatcatgggcattacgttctaccaggaacgcaagacggaacgagccttggaggccttgcgcgatttatccagtcctcgcgcgctggtcgttcgcgacggcgttgaaaagcgcatcgccgggcgtgacgtggtaaggggcgacatactcgtgttgtccgagggcgatcgcgtgcccgccgacgccgtcgtgctttcttgcagttacatgtcggtggacgaatccctgctgacgggcgaatccgtgccggttcgcaaagcgccctggcacgaggccgcgaaacgggaatccgccgggacggaccggccgggcggcgacgatcaggctcttgtttattccggaaccttggtcgtgcagggcaaggggcttgccgaagtttgcgcaatcggcatgcagacggaactgggccggattggcaaggcgctgcaatcggtaacggtcgaaaagacccgcctgtccgtcgaagtctcacaattggttcggaatgtggccattcttgccgtttcgttttgtgtggccgtggtgttgatttatggattgacccggcaagattggcttcaagggtttctcgccggcatcacgctggccatggcgttgatgccggaggaatttccggtcgtattgaccatcttcctcgcgctgggcgcgtggcggatttccaaaaacaacgtgctgacgcggcgcgtgccggcggttgaaaccctcggtgcggcgacggcgctctgcgtggacaagaccggcacgttgacacagaattgcatgacggtgcggcgaatcctggctaacggccgcgactatacggtggattatgcctccaaggagccgctgccggaagcctttcacgaaattgtcgaatacagtattttggcgtcccagatcgatccgtttgatccgatggaaaaggctttcaagcaattgggggaacggtacctgcacgataccgagcatttgcacgtgaattgggtgctcgagcaggaatatcccctttcgcgggaactgctggccatgtcgcatgtctggcgcgcgccggacagcgacgaattcgccaccgccgcgaagggcgcgccggaagccatcgctgatttatgtcatttcgacgaagggcaacaggccgccatgacggcggatgtaaaaatactggcgcgcgacggtctgcgcgtgctgggcgtggccaaggcccatttccggcgaaagaccatgccgggcgagcagcacgatttcgagttcgaatatctcggcctgattggctttgaggatcccgttcggcccgccgtgcccaatgcggtcagggaatgccatgcggcgggaattcgcgtgatcatgatcacgggggattatccggaaaccgccctgtgcatcgcgcggcagattgggcttcattccgccgacgaatgcatcaccggcgcggaattggacaacatggacgatgcggccctgcgggaacgcatacggacggcccatattttcgcgcgggttgtgccggaacagaaactgcgactggtcaatgcgctcaaggccaacggcgaaatcgtcgctatgacgggcgacggcgtcaatgacgccccggccctcaaatcggcggacatcggcatcgccatgggcgggcgcggcacggacgtcgcccgcgaagcggcgggactggtcctgctcgacgacgacttttcatccatcgtgcaggcggtgcggctgggccgccgaatcttcgacaatttgcgcaaggcgatggtctacatcctggcggtacacgtgcctattgcgggactttcgctcattcctgttctcttcaaatggccgctcgtgctgtatcccgtccatatcgtctttctcgaactgatcattgacccggcgtgttccatcgccttcgaggcggaaccggaagaggagggcgtcatgcggcgtccgccgcgcaatccatccgcgctgttgttcgggcgcgccagcgtcgtgttgggcctcatgcagggaatcagtgtgcttgtcatcgtgctggcggtcttcgccgccgcccgctatcgcggccacagcgccgaggatgcgcgaaccctgacgtttgcgacgctcatcgtcggcaatttgggcctgattctgaccaatcggtcatggtcccgcacttttttctccatgttttcggtgcgcaacaacgccctgtggggcgtaatcatcggagcgccgctgtttctgggattggtgttgtatgtgccgtttctccgcgaactgtttcactttacgccgctgcaccttgtggacatcgttttcgcgcttgcggccggcgccgccagtattttatggtttgaaggcatgaaggttctccggcattcggcatgaacaaaacaggccaggcagtggtttcatgagcaagcgccgcaaattcaaaatcggacagcgttccccggacgagatcaaacggcttcgccggcgtttgctcagcggcacgctcgccgaaattcaccaaatccgcgacgaatggcacggtgtccattaccggtggtggatcattacgctgtccggcgtgctggccttgttcgtgctctcgtatttctcctacacccaactgggctggtacgcggaccagcgcccgctgccgacgggcagcgactggcttctccggcgcattccggcggtcaatgtgctgcccatcctgtcgtggggctggtttgctctgcacctctatgcggcgggcgcggccatcgccttccatccgcgccggatcccgttcctgctgttcatgctcagcgtgttcctgttcatccgcacggcgttcgtgtttctttcccccattggcccgccggtcgaaatgattgacatgggcaaactcgattatctgttctcgcgcctgatgggaacctataccttcaaaaatgaattcatcttttccggccacacctgcatcccattccttttcttcctttttttcgacacaaaaggcctcaaactgctcatgctctgcggctcgatcaccatggcgatatgcgtccttctctcgcacaaccattacaccgtggacgtgatcgccgcctaccttatcgggtattccatctacgtgctgtcggaaaatctgttctacggattcatccgtcccctgttccaagtcttcccttcccaggcgagatattgatgatgaacgtttccgcatggctcgaacggctggaccatccgcctattgaattcaaacgaaccctgcgcgcggtctatgggtcggacgaatccgtcgtcgcggcgcgcctgcgcttgctgcggcgggttttgggacgattccgggaacgcttcggcgacgggcccgtacgcgtatttcgcgcgccgggacgcatcaatttgcgcggcatgcacgtggacacccacggcggctacctcaacctgatgacccaccagcgtgaagtgctggcggccgttcagtcgcgggccgacgcggattccgttttcgtcaacaccgatccgcacttcgaggaaaccgtcattcggaccggtgatgcgcgggccggcgagtcgttccgacgatcttggacggagtacatcctctcccccggcgtccgaagggaggtcgaggcgcgccgcggccattggtcgcattatctggccggcgcatggctcggtatccagcatcgtttcccggatgtgctgctatgcggcatgaatgccgcgatcgggagcgatttgccgcggggcgcttccttgagttcgtccgcggccctttgcgtggcggtatgcagcgccgtgcttgcgctgaacgggaaggaactggccccgctcgaattgatcctcgcggcgcgcgacgcggaatggtacacgggatcccgttgtggcctgagcgaccaggccgcgattatcctcggtgggcaaggcgaactagtcaatttggccctgttcgcgccggatctgaacctggcgagtctccggcgcatggcatttccggaaacgctgcgcatcctggttgtcaactcgtacacggaacgcagcctgagcggcgcggcgctcgtggcctatacgcgcaatcgcttcgcctattcgttggcgatggaaatcctccgtcaggagatgcggcgacagggattccccgaacctttcgtcgccgaaacggaccgcttgtcgcgcgtgacccaagaacgcatcccagaccttccgcgcatcctatgcgccatgccggacgccctttcgctggccgatttgcgcgcgcgctatgccttgccgggactcgacgaagcctaccggcaatacttcggaaccgttcccgaggatcaaagaccggacatgatacacttgcgcgggccgctccttttcggcatcgcggaatccgaacgggcgcggcgctttgcggacgcgctgacggacggcgactggggcggcgccggacgactgatgtccatcgggcacgatggcgaccggctcctcgatgcatccggacggccgtaccggttcgacgtatccgacgggacgctggccgaaatggccgcccaacacacgcccatcgaaatggcgcccggcgcctacggcgcgagcgcgcccgtgctcgacggtatcgtggacgccgcgatcgccgcgggcgcattgggatcatcgctcacgggcgccggcatggccgggaccgttctggcgctctgccgagccgaagacgaatcgcgggtcgtgcaggccgtccgcgattggctgggatcggacgaatatgtaaaacgagccgggaaggaacttggaaaagaccaactggacgacgcggttcacgtcaacgccgcgcctgccgccgccgccgaactgcatggcgaatagcgagcgattcggcggcaggctctaaagatctacggcttatccagtgggcgatagggatgttatggacgaaaaaggcccaggaagcggttggttcccttcgcattcttcatccccggcgaaagcggctctttcgacaacaccacgatggccgtcgcgagcacgaggagggcgatgggtgatgcggcgggaacgctgttgggtggaagaacgttcagaatgtagggccgggtgtattggatgcttttcgcaccgtcatcgaaccggcattcgtagacgccggcgtcttcgggaacgaccgggctcagggtgatcgtgcgggttgtcgctcccgtaacgcggggcggggcatccacgatatccgcgccgtccttcttccattggtaattcgatccgtccggcgccgtcaacgagacgaccatgccttcctcaatccaaccgttggggtggggcgtgatggcggttgtgcgggtccgcgcgcggagattgtcttcgcgatgcgtgtcgagcaatgcctgtagttcggcggcctgttcggggtatagcgaagcgaggttgttcgtttcgccgggatcgttttccacgttataaagcgctcttgcgccggtcgagaggttgtgaatcaatttcatcgaaccccgccggacggtttcgaggttgacccaccgcggcgcggcgccgccccgcgtgtaggcaaagacggggccgtctggatcgcgcgttccgaacagatctttcccttgccacgcgggccgcggcggcaatccggccaaggcggccagtgtgggcagcaggtcaacagtcgtcacgacggaagggacggttgcaggggccaaccccggcccattgacgatcagcggcacgcgaaagaccggctcgtagacggtaaggccatggcccaagtggccatgctcgaacatgtgttctccgtggtccgccgtgaccacgaagatcgtgtccggatgcgtttgcgcaatggacaggatcagccgcatgacttccgtgtccgtgaaccggcagtcgccgtcgaaaagggtccacacggcgtccttccccgtggcggacaattcggcataggtacgtgcgggtatcaggcccagcgtgtaatcaatctgatcgaacaggtaaccgtaaaaattctccgcgatggtctgttccgccgggagcagccccgggttgggatagccgaaaagcgcgcggtagacctccggcggccagaagggcagatgcgggtccatgtaatggatatacaggaaaaacggctgcccggcggtttcaatgcgcgcgatggcgttgttcgtcaactcatcggcgggcaggatgggcgccgaatcatcgtcatagatgtcgaagccctgggcaaacccattgtcaaaggtcaagtgattattgctctgaatgccaattgtcgcatatccggctttgttgaaaaaggtggccatcgtttcgatggcgcttggcagcgtggatgtgcctgtatagacctgatgcgcatccacgtgcagcgacgtaaacaccgaagccatagccggacgcgtccatgtgcaggccgtggttgcgttggtgaaccgcaccgaatgcgacgaccaatcgagcagggcgggcatgacgccctgcccaccgcgttccgcgtcaagccggtcggccctcaacgcatcgagcacaatcagaacgatattgggcggggggaaggccgtcgccgcggtgtccatggccaagaacagcgccgctgaaagcagaaaatatttgatcttgctggtcaaaaagttgcttcaagctcgaccggtggcacaccatctttgtcccatccgcgcttttcgtaatacagcgagagcattttctcgaactcgtgttcatcgagtgttttccccgcgttggggccggtcagcacgggggctttggtcactttgaacgggagcgaatcggccttgcgggtcgcacccagccggatgtttatgcgccgcgtgaggttgtagacccgatcggacagttcgagcagttcttcgagcgtcatcgtcttgcccgtgacataggtgtaaaacttctcgtagtggcgttcgttgaggccgagttcgatccaaggcaagcggcagacgccgagcatgtcgaacagcggccgaacggcttggtggtacatgacaaggtccaccttttgctcggcggaccacgacgcgccctcctcgatttccttggcgatggtccatgcgcgggcgtggtgcgcgccgatgtccgacgtggcgtaggccagccccatggacgtgccgacccggctgtcgtaggctgactgttcgagcccttttacctggagcaggatcttttccatttcgggccactgtttgatgatgcgccgcgatccgtccgcaaggatatcgcccacgccctcccgatgggcgatgcggtgcatcaggtcgaggatggcgtcgtcgtcgttccatgcgatgcccttgccgtcgagatccgccagcgagatgacgcccttttcgtagccttcgatgacggcgccgatgatgctgcccgtcgagatggtgtccatgccgagttcgtcgcacaatttgttggccgccaagacggcgtcgaaccgctcgacgccgaggttcgatccgagcatggcgcaggattcgtattcggggccttccgtgacggtgccggcgtatttgccgttctttacgagacagatgttgctgcagcacatcgggcacatgaagcaggcgctgtcgccgatcttgtaatgttcgagcatggtttcgccgttgatcttgtcgtgggcggcgaaggtggtcgccttgaagttgtacgtcggcaggatgcccttcgagttcgcgtattcgatgacgttcatcaggccctgctgctgccacagccggaaatacttgtgatccgtcatgtatttgacggccttttgcgtttcctccacaagtccgttcatgtcatggaccggcagatccttcgtgccgcgcacgacgatggccttgaggtttttcgatcccatgatcgcgccgatgcctgtacggcccgcgttgcggctccaatcggaattgacgcaggcgaatcggacgcggttctcgcccgcgaccccaatgacggcgatatgaaggttgtgcgagccgagcttctccttgatgatgccctccgcttcgaggcaggttttgcccttgagcgcgggcatgcggatgatgctggtgtgttcgtcgtcaatgaacaggatcgaaagttccggcgccgcgccggcaagggcgagataatcgtggccggtctggcgcagttcgacgccaaacccgccgccaatggacgaatcgccgtaaaggcctgttgccggagaaattgcgacaaatgaatttttaccggacgacggcacgtagcaaccggtcaacggcccggccgccacaaccagcagattctccggaccaagcgggtcaatgtggaaatcatgcgccttgaggttgtcccagacgagtttcgcgccgaatccgcgcccgccgacatagcgctcgatgaaatccccggaaagatcgcggcgttcgatgacgcccgtggtcagattgacgtgcaatcccttgaaaaaatagccgcccttgagattcataactgctcctttccaatttcggcgtattgaagcgtcttcgtctcgcccttttcgacgaattcaatttccttcatctgggtgtagcccaggacgttgttgaggcgcttgctttcgccgagggcgtattcgggcacgagccgaatcgcgtttttggggcaatgcttgacacattcgggatcgtcgtcgcatagatcgcacttgatcggatattcgcattcgtcgtgcgcgtacatcgcgccgaacgggcacgattcgacgcaatgaaaacacgagatgcagacgcccgtatcgaggctcaccacgccgtccctgcggctgatcgcgtccaccgggcacacttcctcacacggcggctttttgcactggctgcacacaatcggcatccgaaccaccggatgtgggtaggtgatgagcacgcgaatcgcgctcttcttggggttgttgacgccgaaatgcttgatcgcgcacaccagttcgcacatcttgcacccggaacattccgcgggaataaccgccagctttcgcgacatcctctgcctccgagtagcccgacttcacaaggcaggagccggaatattccgagttccacgcactgcgaacgactacgacttccgcgattccggcgtgcggcatccacaagccacgcgccgtccatcgcaaacccccggtatactaaggcccgagcagcaaggaatcaagtggaaagcagcgccgctgtgtatcggcaagcggccccaccgttatttcagtctgtaaggcgttatgcgacccagtagttccccgatttcgtcgcggatattgaggagttccgaagcgtcctgcgtatgcgcgttcggggccttggcgatttcgtttcggacacgttcgagcagggccttggcggtttggcggtcggcacggggcatgcctttgggcggtttcttggcgaaggcttgcagcatatggaggtattcgaagtcctccatgccgttgcggatgtcttcccagcgcatgcttgaacagatcttgtcgcgtccggggtacacgatgaacggatcgccggccggcaggggttggcgatcggcaacgtagatgctgccgccggtcgcgtccatccacggcgacacgtccaccgccgccgggacgggatcccacgtcttccaatgcgcgtatccccagtgcaggaatcctttgaggtcgagcgaccacgaaagccaaaacaggatgcggttgcggatgagcggataatcgaggaatcggttgggatactcgccctgtggatacaggcagacgtaactccacgtggcctctttgggattctctttgcggccgggtttgatgtgctggatttgcgggacgcggatgtcaatgaagccgtcaagcccttcgtgcatgatcgcgtccacgatgggtacgccgggcagccacccgcgcaccttgcccgcgcgttccgtccatgatttctcgttgacggggatcggttcgtccgcgatgtgctgaatgtatcggcccgcccaacccttttcctttaggtgcgcccagacgcccttcagaaaggcctccatatacggctcgaattcggcctcggacaacgtgccggtgtcaagcggtttgccgtccgatccaacgatgttgaagcgcgaccagacaaattgactttcccacccgccgcagcgccccgcgacgtggccgccctcgatccacgtgacgcccgccttcttgaacatttcgacccaccggtcgagcgccgtgaaatcgaacgcaaacgcgccgtccgcctgttgcgtcatgcagacgagcatcgtgaagggcgtgaggatcgtatcctgccggtggcggcccatgtcctgcgcgacgcgatcgatccacgtccagcaggcgtcggaaaagagcggaatccggtagtattcggcgagattggcggggaagaaccactccgtttgatgcagcgtcggttcgtcgggcagcgtgaatgcccaaacgtgaatggcaacgggcacgtcaatgtgctgcccgtcgaggtctatgcccagcgtgccggtgtagtcgccgggcggcgtgtctttcgggaccgtcacggacacccacagcggctgcgtccattcgtcgcggatgcgcacgaccggttgttcgagaaatccgtcgggaaagaatcccggtgcggcgcgcaggaaggttttcggatccttgttcgcgggcgggttgttatggacgtaggtataccatatccaatgcgcgccgagatttgacttggcgatgattgcgccgtccggcccttgtagatccggcagcgagaacgacgccttcgcgactgtcagacccttcggggtgcgcagcagaacctgcgcgtcttcggtatcgtttcgcgctgctttcaacgcaatcgcttgcggcgcgtttgccggcttcacggaatccggaaacgccttgtccagtgaatgtgtcgtccaccagtcaatgttttccgcgcgcgcggcggcggaacctatcaggaccgcgcacaccgtgcaaccccataaaaacgtccccatcgcatccatgatcgcatcctcttccgttgaaactttttagtgcgtccaattcgctcgccatcataatcgaaggggcctgtacccttcgaatagatatcgaaggcgtgccggaagcggtttgaaaacgctttcggggggctgatacgataatcggcgatggggatggagttccccgtaatcgccatgtggctgataactcctgtcgaaaaaagagaaggcgataggaggttgcagcatgagagatacgaccgcgagcgtcgaactcctggggcaaatctgcgcgcagtttcatcttcagaatttgacgccgcagctcaatgcatgttccgagaccctccgaagcggcgggagggtggaagtcgccgtgctcgggcaattcaaggcggggaaaagttccttcctcaacacgatcatcggaagcgaaatcatgcccgtgaatgtcctgccggccaccgcggtaattacgcggattgggtacggccctacggatcgggccgtggtccatcggttatccggcgaaatcgaggaaattccgttggccgaactgcccgaatatgttaccgaacaacgcaatccgaggaacgaaaaacgcgtggccttggttgaggtggaactggcgtcgctggcgccgtaccgcggtatatgcttcgtggacacgccgggccttgggagcatcttcgcccacaacacgcaggcgtccatggactggttgccgaaggtgggcggggcaattgtggccatcagtgcgaaccagcccttgggcgaacaggatctgcgactgttgggtgaggtgttcaagcataccccggaggtggtgatccttcttacgaaagccgatctggtttccgatcgcgaacggaaagccgtcatcgaatttacgcaatggcagattgcccagaataccggggggcgtcaactcctcgtccttccgttctcgaaccggccggattttgaacggtttcaaaacgatgtacgcgaatacctcctcacgaacgtggcggggcgccatgaggagttgttcgtgaaaatcatgggacacaaactctccgccctgatctcggaatgccgggcctatctgatcctggcgcagacggcggcccagtccgcggaagcagcccggtccgagttgcgcgacatgattcggcgtgaacgggagggcttggattcgttgggaaaggagattcacgtattgacccgggatttgaaaacgcgcgtacgcacggcggccggcgagcgattccacgatcttcacggcgaattgaccaagcggctttgcgcatcgctgaaaaaagcgatgggcgcatggacgggcagccttgcgaaaaggacccaggcgtttcaggattgggccgcaagggccttcgaggaggaattgggccgcgtttcggagcatggaaaaggatatctcgaagaatacctaatcgaggcgcaagtcagttttcatcgcaccgtgcgggcttttcaagaccggttgtcgaaggaaatcgagcgggcgctgggcatctcgttcgaaagcgcgcggtttcacgccgaaatcgcggcgcccaggaagcctgacgtgaaaatgggccaagtcttcgacagccatatcgatctcctctggttcgccattcccatgggcctttttcaccggcttttcgagcgtcatttccttcggcttatcccttgggaggtggagaagaatctttcgcggctggccagccaatgggcggacgccgtaaacgcctcgatagatagtctcgcccggcagtccatggaatccatacaaaacgaactggcgaccatcgaagggctggtttcgggtgtgggcgatcagtgtagcgccatcgaaacggcccttcgccggctcgacgaatgttccgaatgcttggcgattccaaacggaagaggagacgcggccgcccatttcggaaactgttagttccggaggccggcggtcccgctaccagtaccgggaatgcggaaagatggcgaagcaaccgatcgaaacaagcccgaaccacaagcgggttatcgctatcacgcttagaatggttgacgagtttctgtgcgaatgcgaactatgggcacggggccgcgaactgcactcggttctctatcgggaggaaaattcgctcacatcggaacagcgtgagcagattttccataaagtggaatcccttcgctctgttttgatggaaatgcaacagacactcggactgaagaccatgataaaagaacccgcgcgcatcattcgtgcggcctgttttgccctttgggaatccctgatcgaactgcaggggaagtatatccgcgcgtatggcgaaccctctggggaactggtggcatatctcgatccgaagagcgaagagattatcaccctgctccaagacattttgaagatagtcgaatctgacaagccttccacgaagagttcagcatagatgcatgggctgttgtcatggctaacaagaagaaacttcgcgcgctggacagcgccgaaaaggaacgccgccgggaaaatgcgcttcggcccaatccctatcttgggtacaaccacaatgcattggccttgtatcttttggaacgcgaagcgtacgccattgccgaggctgaactgaggcgggcggtctggctcaatccccatgaaccggtgttcatggccaacttggcgtggtgccttttcaaacaggggcgtgatgaagaggcgtggaaatgtctgcgacaggctgtcggaaaaaatagccataacccgcggatagaccaaatcgctgcttggatgggactgtccggcggccgtatcaaggagggcagcgatgcgccacaagaatgaaaaacacacggcctacttcgatgtgctggatgcgctcgtgaagacggcggagtgcgccctgtgcgcgctcgaatccgtgtccctgaagcgctacttcgacgggctgctttacgagatggtgaacgatccgaaggtccggagcgaacttgcccactccaagggatattgccaccgacatgctcatatgttgctcgaccaatccggcgcatttggaacggccctcctttaccaggatcagattgaggcgtttagaaaatgcctggaaggtttttctgtggcaaggtcgaggtacgtcgccggaaggggggaacgttcctggagcacccatgccgggtgtccggcgtgccgcattcaggacgaatcgcgaaaacggaacctatccgttctttgcaagtggatcgcggatcccgacatgcgcgccgctttccaaaaaagcgccggtttttgcgtgccccatttcttcgttgcggtcgaatttttaaaaagaccggaggattgcgagttcgttgttcaggtccaccgcgaaaaatatgctgatcttgcacgggagttggcggaattcgaacgaaagcacaactaccaattttccggagagatcatgggcaaagaatgcgattcgtggcagcgcgcggtgaagatgattgtgggatcgcgaggcctgttttagattgccgtgaatttgctcttacggcccggcgtggcatacaatagaatacatggggatggagttccccataattgccaagtggctgatgactcctatcgtgtcgaaggatgcggtaggagtttcgtgtaaggaaacccccgcccaaagggatggtccctatccttccaatcgcgtcagttcatacgaggaactgatgaatggaggttttttatggaatcggcatttgcggtagcggcgttatggatggggctggcggtcgccgccacttcgctttcgaatcatttgcggatatcggtcgcgttgattgaaatctgcatcgggatcgcggcgggattcgtggccgatcggtatttcggcgcaggcagccttggcggcgacctgccctggcttcgttttctggcgggcacgggcgcggtgctcctcacgtttctggctggggcggagcttgaacccgccgtgcttcgtaaaaaatggaaagaggtgtcgatcgtcggcctgattgggttcgtggcgccgttcgttggctgcgcagccgtggcgcactttgtcctgggatgggatgttcgggcgagcgggctcgcgggagtcgccttgtccacgacctccatggcggttgtatacgcggtcatgctcgaaacgggcttcaatcaaaccgatttcggcaagggtattctcggcgcgggctgcttggaagtgccttgccgttcggacaggtttaccgagacaatcgaaccgttgcgcgtgtctggacaggacattgtttccgctttctccgggaactcgcatcatcagaacctcctcgatgatacccgatgccgggtggcagccgccaatcggacgcgcgctacggtttcttctcttctttcttgtcgtccttcttcttgtcgaccacgccgtcgggacagcgaatctcgatagtctcaaggcacttgacactacgcccgacccatttgtcgccgggcaggatcagacggaatttgccttcaaggggcggcagaggttccgcgttcttgtcgatggcgatcatgacgcgcttgccttcggtcgtcatggtgagctccgtccaggaagccagcgtctgatagccgtccgttccgcggaacaggacgtacatgttttcgcggcgatactcgctcgcggcttcggcggctttggccttcttgaacagttcgctcaagcggacacccgaatagtcgaagatgccgatgaaccccgaagagtgtcctacgcaaatcaactcctcttcgatgtcgacgggcattttacgcagatccgccacggacagagggatcttcgtgccgtccaagtcgacgattgtcagcgtttccgaggagcgcgcagggccttcagcccacgctcccgccgcacttatcacacttgccgccaatatacacacactccatttcagacaagacatcatactcgctcctgtttgttgttgtcagcacggcttgctgtgaaaaccaaggggactcaagggacaacggtcacggtggcgggatcggtcggttcggtagggccgcccttgccgagcttgtcggccagattgcttgtacaggggtaggtgttcgggtccggtgtggtcgagttgggatcgtgagcgatatagcgaatccattcggcatgggcatcgagatagaggcagttcatgccgcccgggacgtggttgaactggttccccgtcccgcttggattctgacataccatgtcccagatgaccgggatcgtgctttgcgccatggcggtagccgcgggattgttgatgtccgtgacgaagaaacgttcgacgccttcacgcaaacgataaaggcgcgtcgtttcctgtgtttgcgtgtcgatatactcgatatcggtggtcacgaagttttccggcaagactttcttgctatcgcgggcatccttcgatgcgttcttctggatgccccaatcgtcgtcggaacgtgtcgcccacccaatgtacatgtatgaataatcgcggaactgctgcggcagttccttgaagcgaaggtctctcagttggtcgatgatgcccttgattcgccccgcctggggatcggacggacagaagatgatgttgtagtccgacatgtattccggatagacggcaggcccccaaaagaatgtatgcatgggtacggggtccgcgccgtcggcggggtagtagcccggatactggggcggaaaattctgggcgccggcctcgtttgcatacatcttgaataccaggccgagctgtttcaggttattctggcacgaagaacgccgtgctgcttcgcgcgcgcgcgccagtgccggcagcaggatggccgccagtatgccgatgattgcaataacgacgagcagttctatgagcgtaaagccattccttcgcgtcaacattatgcagtccctccctgtgtttatggatcgttgtgttggatgcgagcctattcgatatgcaccgcgaaacataacgatagcataccacgtcttttttcgaatgtaaagtttccgtaattactcctgcccgattggatctttccgcttctcgataagggcgatttccccgataatcatccgtttgtccacggccttgcacatgtcgtacacggtcaacagcgcgacgcttacggccgtcaaggcttccatctcgacgccggtcttgtccgtcgcgacggcttcgctctcgacggcgactccgtccgattcgagcatggcatggacacggacactgccgatattgaccgtgtggcaaagcggaatcaggtcgcaggtgcgtttcgcggcctggatgccggcgatctcggcgatggcgagcacatcgcctttcttgatgtggttctctcggacgagggttattgtctccggcaataaatgaatgcggccgtgtgccctcgcaacacggcgctgcacgggtttcccgctcacatccaccatccgcgcgcggccttcgttatcgagatgggacaactttttcaccttcatcctcctatgctgttaaaatggccacggctcgtctggccgcacaagggtttctccgccacggcgcgcagaatggcctcgcgcgcgcccagttcgcggacgccgaattggatgtcgttgaagaggcacgggcggatcatgccgtcgcatgacaaccgcaggcgattgcagcgcgcgcaatccccgccgcttccgccgatcacgaccgagaaatccccaatttcgagattcatccgccggatatagcgcacctccagcccctcctgccgggcataggccgcgacaccgcgcgcatcgggttcgtcgggtgagtcctgaacgacgcaattgagcttgatgggggccagcccggcctcgcgggccgcgcggatgccttcgagaacacggtgtacgtcgccgccgcgcgtaatggccgcgtaacgggccggatcgaccgtgtcgagactgacgttcacgcggtgaagaccagcttcgacaagtgggcgcgcgaattcggccaggcgcgtgccgttgctagtcatggcgaagtccgcgatgccttccatgcggctcagcatttcaatcaacgcgacgatgccgcgccggacgagcggttcgccgcccgtcacgcggaccttggtgatgcccagttccacggcggtccgggccacttcggcgatctcctcgaagcgaagcatgcattcgtgtccgatgggagggacgccctcgggcggcatgcagtaggtgcaacgcaagttgcatttgtccgttacggagatccggagatagtcgatcttcctattgaatcggtcgaacacggaccaacgttccttcctgcatgacggttgttccaatgggcaacacgatcaatccatcggcatcgcacaaggcattgatatgggccgagccgtgatatgcgccggcttcgacgcgtccatccggcgtgagcttgacgggcagccatgtttcgcggtccgttcctttcgtcttgatgggcgatgccagcggcaacatcgaatgaaacgggtgaaaatcataccccataatcttgtagagaaaaggcttcacaaggatctcgaactggatgaatgtcgagacgggattgccgggcagtccgaagcaatagatgtccggagagacgccaaaggtggtcggtttgcccggttttattgcgatggaatcgaaaaggatttcgacgccgttttccgtcatgatgtccggcacgagatcgaagtccccttttgacacgccgccggagagcaggattacatcgttttccgctatggcccgtttgagcgcactatcaatcgcgggttttgtgtcgcgcgcaatcccgtagtacgttggaagcgtgtccgcggtaagcgcctgcgcgtacagttgatggctgttgctcgtgcgaatctgcgaaggtccggggtactcggtgggctcgaccagttcgtcgccggtggcaatgatccctacgcgcgccttgcggtaaacgcgcgggtacgtacaacccacggtggcgaggaccgccacatgttgtgcggcgatccgcgatccgtgcagcagcaccgcatcaccctcgcggatgtcttcgctctttcgacagatgttgtctcgtgtcgacgcgccattgaagcggacaacgttctcgcgcacctgttcggtgtactcgatcataatgacacaatccgcgccctcagggagcatcgcaccggttgtctggaccgatagcacgacaggcgggtctgcatcgtaggtgcgaatgagcggcgcggaagccgagttgggcgatcccagcgaattgaaggcgacgcccgccggaatcgagacggctatcacaacggttccgcccgacggaatcaggtcgaaggaataggccgcgtccatgccggtgaaatggtccaccgaggcattgtccacgacaatatccgtggcgtcgaaatccatgacggattcgctgaaggtggccgttaccggaataggggctgcattcgttggattgggcgctatcgtggccagaacaaccgtcgggctgggcgattcaaaggtgatgccgagggatcccggcgtattgggattgccggctgtatccgtggcggcgcctgcttccaccgtcgccgtaaccggtccattcgacatgggatacagattgaacgagtagctgtcgcccgcgccgacaaagtcgccgacaatggcattggacactcccacatccgaagcgtcgaatccaaggacggattcgctgaacagcgccgtcaccggaatgggtgtcgtgccggtggggtctgaggcagtcgtttgcagcagcacggtgggcggcgtattgtctatcgttacggtatcgcttggacccgcattcggagcctcgttcccatcggcatccaacgccgttcctgccgcgatggaaatacctaatgcgccatcgccggagatccccgaaatcgttactatccgctggactgctccgctcccggaaatgccgatggttcccgatgcggtgccttcgatattcagaactacatcgtctggaatcaggctgatgctcgtcgcatccgtatagataagaacaaactccaccggcccgatatttgttatgggaatcgaaggtccgacgatggatatgcgggggcccacatattcgtaggcgcccatgtcgaactcggaaccttgaggacgcacgacccccgcgaggtccgtcaggggggcgtttgcggcggtccccgcgtcaatgcacggcgatacagcccggagcctgaaatctcccgctgcgggattccgcaaggcgggatccgcatcgagattgccttggccgggccatccgccttggatatccgaatagtctgccgtggcgatcccgccgttgtccacggcgatttccccgttgccgtcgttccacaggatgcagtttactatcgcgcccgttgaaccggtgcgggtaaagatgccgccgcacgtgtccgccgtattgccatacacggtgcaattggtgaaagactgaatgccgcctccttcattgtaggccgccccgcctgccgttccggagatgttgcccgaaaaaaggcagttcacaagcgagggagcgcagtttcccccgttgtaaatgccgccgccttttactgaagaggcattggcggtgaaccggcatgccgaaaaagattgtgtccccgcactgttgtaggcccctccgccggcattttgggcggtgttggcctgccaagtgcaattggctgccaccaaaatccctccggtggtataaatgcctccgccgtccatgccggcggtgttggactcgaacgtggttgaagtgatggtggggcctgcgccgttgttgtacacaccgccgcccgacccggtcgcgttgttgaaccccaaataacaggaaatcaaccgggggccgcctccctcattataaacgccgccgccatcgcgcgccgtattgtacaggaacgtgcagttggtcaggcgatgggaggcggccttattgtaaatgcccccgcccatttccgatgcctgattgttgaaaaataccgtgttttctacaatcgccgaagcgccgagacaattgtgcatggcgccgcccaagaggccgtagttgccatagaagcggcagttggccacggaaactccgccgccatgattgtacatgccgccgccatatcccagactttcctctccgtccgcacgcccgccggtaatcgaaaacccgtcaagggtggcgcgattgtttccctcgataacatgataggccggaataccggggccgcggccgtttgaaccgtcaataatggtcgtgcgcactgcccagtcgcgctggttgcgttccgtctccgttcccgcgaatcccccgtacagatacacgcggcgctgggttatcatcaggctaccgttcggactgggacgggtttcgtcatagatcccttcggccacccagatttcgtcgtcccgtgccgccaaatccagcgcgggttggatggtttgaaaagccgtggcccaactcaagccatcttccgttccggacaaattatccctgtcaacgtaccatacccctgaaatagcaggaagggaacagagcattgtcagcacgaaaaaacggtctttttcataattcgtagatcctccctggcgcactaccccgctttgttttcatttaattaaacttccctcacatttgaattttacacttatcatagaaaaaagtcaaaaagttttttttgtattattaacttgagagtaccatgttctcgaagttgggaatgtaacgccgatttccaaatcggcttgttgaaacgcgacatgccgatttggaaatcggcgctacaaagcagccattttcaatttcaacacaagatctcgttgcctgatccgacatgaaattgcccggaaatgccaatcttcctggaaattctcatccttattgtctcgaatccgctgaaagaccgcgttggcgaataggtgttccttgtctgaaagggggccgatcccgtataagggttcaggcctattggaggaaacgggcgatgggacgcgtgaaggcgttttacgggaccgtggcggttctgggcggctttgtattgattacttactggggcatgatggttgtttggggcagcgggtcctggctgcatgggacgcgcagtcttcgtctcggccccatttatgtgccgatgttgctgttggggctggcgacgttgattgtcctgccggctttcctgttgagcgtgtgcaggatcatgcagactcgcggccgtttccctcgatggaccgggcttccgggcgccagttgcgcgatggcgtggcaggcgttgttgcttgcggcgctggtgctggttttcgacacgccatggtccggtttgtttcgcacggattgggccggggtttttcgcaatgcgggcaagccggcggttctcgaattgggcgacgaccacctgaattatcctgagctaccgcttcagcccgtggattattatgcgtggtccgtttacgatctcgacggacgggaagtgccgatggcgtcgttccgcggcaaaacgcttttcctgaatttctgggcgacgtggtgcatgccgtgccgttccgaaatgcccagcgtgcagcgtctttacgacgcggcgaaggataagggcgtggcgtttgcgtttgtttcgcgggaagaggcggagactgtccgcacgtttatgaaagcggaagggtacacgctgccggtgtatctggcgaaagaacgccccccggcgttcatggccattaccgggatccccgcaacgatgatctttgcccccgacggccaactggcatttcgccacacgggcgccgcggcgtgggacacacccaagactcttgagtttctcgcgaaactaaccggcgttccgtgaaatggacagtcccgtgaatgaaacgaaaccgcttggcgggggtgatatccggcgattgcgcgccgattttccgctgctgaccgattccggcgttccggtcatctatctggacaatgctgcgacgacccagaagccgcgcgccgtcattgatgcgcttacccggttctatgcgctacagaacgcgccggttcatcgcggcatttaccggcttggcgatcaggcctcggccttgtatgaacaggcgcggagccgggtgtcgcggttcattggagccggaagcagcagcgagatcgtgttcacgcgcggaacgacggaaagcatcaatctcgttgcgcagaccttcggacgtcggagactcgggcccggggatgaaattctcgtgaccgaaatggaacaccatgcaaatatcgtcccttggcaaatcgtctgccgggaacatggcgcgatcctgcgatggatacccgcgggccgggcgtgcgaagtgcgggccgatgaattggcgcggcgcctgggtccgcgcactcgcctgctggccgtcgtccatgtttccaatgtgaccggaaccgtcaatcccatcggctccctcatcgaaatcgcccatgcgaaaggggttcccgtgttggtggacggcgcccaagcggccggccatttgccggttgatgtgaccgcgctgggctgcgatttctatgcgttttccggccacaagatgctggggccgatgggcgtcgggatcctgtacggacgtggggatctgttgcgagacatgcccccgtggcaggggggcggcggcgcgattgcgcacgttggccgcgattcgtccaccttccgcgaaccgccggcgaaattcgaggccggcacgccgcccgtggcggaggccatcgccttggccgaggccatcgaatacatcgaacgggccgggcgcgcgcgcctcgcggcctatgagcaatccctgattcatcaggtcgagcgcggtctgaaagccattccgggcgtccggattcatggcgatcccgccgaacgggccgcggcggtttctttctctttggagggtgtgcatccgcatgacgtcagccagatgctcgatgaagacggtatcgccgtgcgcgcgggcaatctgtgcgcacagccgttgatggatgcgctgggcgttccaggagtcgttcgaatagcgcccgccttttacaacacaccggaagaaattgacttgacgatgcaagcgctggaccgcgtgcgcgggatttttcgatgaacctatacgaccaagtcctgctcgaccataaccggaatccgcggaatttccgccccatgcccggcgccacgcattccggcgaggcggataatccgctgtgcggcgatcgtatcgccgtttttctgcgcgtcgaggacggcgtcgtggccgaggcaagttttcagggcaaggcgtgcgccgtggccacggcatcggcctcgctcatgaccgtcgccgtgcagggggaggttgtggaggaagcgaaaaaaatgtgtctttccgtgaaggcttttctcaatgaccgggcggaaccggcgccgaccgcttcccttgccatgcttgaacgggtccgcgattatcctgttcgcatcggatgtgccgaattgccgtggacagcggttgccgccgcgttggcgacgggggaccgacagccctaaagcggatcgattggcaattcggggcaatctttttcatcagatggtattgacaatatgagaaatcagcgatatagtagtcgcgacaagtgatagcttgtgcagtttggcggcgaatagagaagtttgcgcgtcggtaaatgcgacaaaaacatgagaaaggagatcgttggggacgtttacccaagcaggtgatggccgaagtgtaagggcagttttccgaactactggcgaagtccaacacaaagggttgtcacatgaaaaagcaaggttttacgctcatcgaattgctggttgtcatcgccatcattggcatcttggcggcaatactgttgcccgcgcttgcccgagcccgtgaatcagcacgccgttcgagttgccagaacaacctgaaacagcttggcgtggtgtacaagatgtacgcgaacgaaaaccgcgcccagaaatttcccatgatggccgcccggttgtcgtatcaggtccagaatgcggaggtcatctacagttcgtacaacgaatgcggatacaacaatccgtatctgccgccgacggcgggcggcgacgcggaattcgtgccggacgggaagtccatttatcccgaatacctgacggacgtgaacatcctgatttgtccgtcggattcccaggcgaaaaaggcccagcagtactggtttatcaacggcaaggtggatccgtgcgcgattacggccgaatcgtacatgtacgtgaattgggccctgacaggacgcgacggcgaaggatatttgaaatccggcgcggatcccaatccgggcaatatgcccttgggcgtggcggcgattggcacgtatctggatcttggcttcatcaccaaggtcaacacgcttctcacgcagcagtcggccatcgatccccccggctcgcaaaacctgtatgacaccgacttcaagttcacgaaccaggacggaaaagaaatcaccatctatcagatgcgggagggtatcgagcggtttttcatcaccgacatcaacaatcccggcgcaacgacgcgcgcgcaaagcgtcattcccatcgaatgggatcttgccagcacgaccgccgatgagttcaaccacgtgcccggcggatcaaacgtcatgtttctggacggacacgtcgagttcatcaagtatccgggcgaatttccgattacgcaggcctttgccgtcatgacgtccatgttctagcgtcgtgagtcgccgatgcaagggacaaacgaccacagcaagtgaacaaaagggactgacccgcttttcgggagtttgatcagcggatcagtctttccttttttcgcggcctttctttcatccttgcccggcttgccgaaaaagaactcgatgcgaagatgtgggaagaggcgaagcattgcacccgcatcccgcattcaagtttgaatcgcttgcatcgaacatgtaggtctttttttcaatctctgggtatctgcgtcatctgtggaagatcggaagacggtccgtggatgccgaaaaaaggaagtgggattgtctttgccccaatcgcctgcaaagaacttgacgcaaagggctggaaaacgggactcctgaaaaaagcgcggttattccggtttctcttccacggccgggtccgggacgaaaaaggccagggaagcgaaactgatggaggttcgggtgtcgcccgttttgcgcgcggaaatgtcatgggccagcaggcggccggttgcggatttcggcacgatccgcagcaggatggcgatggcgtttttcgcgcagattggattgcgggtatcgtcgagatagcggacaaagccccggaaatcccgcgtgagaatgaggcggaacgcctccttgtccagtgcttcgatggattcgatgatgttttccttgaaagggcggtaactgaagttgttgccgtaatgcgtaaagtcggaactgacgaccagcagggtccgatcatccatcagggggtgaagcgatttcgcgacggcttcgatcgcgtccacgtcggtcttcttctggtaatcaaggaaatcgccgactaggatggggatcaagcggaacgttccaaggcgttcctggaggaagggcaacgtcgcctcgattgaatattcgatttcgtggacttgcacgcgggacgaatcggcctggtagttgacgctacgcacttcgatgagcggcgaaagatccaactgccggatgctttggccatccaacggaatgctgcccaagggggtttggtaaaactcgaccgacggaatcgagcaaccgcggaaggaactccggtgcgacgcccccagcacgataacgcgatcgtattgtcccggctgaagcattcccagcgcggcgcccgcaatggcgccggatgtctggtacggcgcatgcggcacgatgcatgccgccattcgttcgcccgccgggggccgcgcgtctttcatgcactccttcagggccgattccagcgctgctttgtcggctggataccagacacccgcggcgaccggcagggcaaaacgcgttacagcttcggacaagccgctccacagaagcgtcaggcagatgccgtaaaaaatgtggcgccgcatcgcgcgttgtctcccgttgtcggaacgtatctgaaaatgtatcgaatcggctgcaggattgtccatgtgaatggttgaacaaccgagcggccgtttagggtatggttcgatggttcattgctgttcaggcgcaatgcttgggcatgggcagggctttgccggccttggatgatttttcggcggtggcgatcaccgcgatgacgcgccgggcgctttcgggggtcacgacaagcggctcgccgagcatgagatgatcggcaatgttgcgataataggcgtgccagtcggactcgaagtacttgagcgtcgcctcggatcgcacgccgtcgcggtaactgatgacagtaaacttgtcgtcatcgtagtcgaggatgccgcctttcgtacccaggatgcgccatcgcggtttgccggccgcggcgatttgcgacaattcgatgaaggcgctgcatccgttcgagaagcgcaccgtggccgagcaatggtcctcgttggtgacatcgtgccagacgcgtttttcctggaaatagccggagacctcgacgatttgcgccggaacgagtccgagggtccaatcaacgacgtgtgcgccccaatcgtagaacgcgccgccgctgatctttttttcggaccgccaccagtaactcggatggccgtatccgcccatgcaggcctcgatatggaaaacctcgccgatcaggccgctggcgatcgcgtgtttgatggccatgtagtcgccgtcccagcggcggttgtgaaagacgctcaacatgcgcctgttcctgcgggcggcggcgatcatcgcatcggcttcttcgatggtgatgcagaagggtttctcggtgatcgcatggacgccggcattcaggcattcgatgacccgtttggcgtgatcgttgtgctcggtgatgaccgtggcgagttccacgcctgatttttcaagcatttttcgtgaggaggcgtaggtcggaatgccgggaaagtcctcctcggcctcaatccggcgctgttcgacaaggtcgcatgcggccacaatttcaaaaccggcggcgcgcatgctttcgagatgaagtcggcccatcttgaacgattttccgtatccgatgacgcccgccttcatggatttgatctctttgcgaccaaaggtccagtccacgcccctccggatcattttctggacttcggggtgattcagcgagcgttcgtcgtggcccagcgcgaggaaaaagacccggcctttgccgtgggtccgtgtgtatgccatgggctgcggcttgccccgccacatggccgttgcaaggacttcgcaggaatccgcctggaatttgtcgagcagatacagttcgtccgtcacgcggaaaggttgtatccgccgcgtgatcatcgaatccgccgctgtcggcgtcacgggaaactcgaattgcgcatcgtgcccggcaaacgtcgagccgagcatgtccacataagccgcatttttcgtgaacgaggccgccgcgccatgcaatccgatgaatgcgccgccattcttcacgaaattgacaagcccattttcctgatctttccgtagttccccgccgtcggcataaacgattgccgcatcaaaacgcccgatatttcccgcgcgcagcgtgtttaggtcgtgcgtcggtgtgaccagataccgcccggtgtcttccagaagtttttttacaatttcgccgcaccgatcgaggggatgatattgtccccccagtaccatgaggatttttttcatcgtcgccattccgcgtcctttctctgctataattacacggtgtcaaagtgcattgagtgcgattttacgtacataacggaggaataacaaatcgccgcgggcggggaggcaatgacgaaaatggatggggaggcgaaagtggttgcctgtgccgcatgcggtcatgtcatgaaaattccgccccagtatgccgatacgccggggcggtgtggccggtgtggcgccacggtaaacgatcgcgttttgatacccgccattgatctgtccgatctggggccgccatcccccaaaaagaagacatctgcggccgtccagaattcagaaaccttttcgactactgttcgccgggcgttgctggcggggttggccggtgctttggttggggggggtgtcgtaggcgctttctttactattcgtcgcacggaggggcaggccatcacgccgggcactcttttcgcaaacgccaacacggggctcgtgctcggtttcacgatatgttcgctgtttttctttgtcaagcatttgaattggggaccgttcagggcggccggggctggaatgctcagttgtgtcgtgatcggctccgtcatgtttctcttggaagcccgtttggttgccccgccggacataggtttgtttgcccaaatcgcgatggccgccatggcgggaggggtcgcggggttgatcatgggggccaaattgaacaacgaagactgaccgtatgccggagacctcggccgccatcatgttccaattcataaggagatggcggatcacacattgaatctccgccattgcagccgttttttggggcctatcccatcgcgtgtgcgcgggccgctggggttcgtttttttgaatcatgttattagggaggcatatacttttttcgatcgttgagggaacgggaggtgagcgatgcaaagagtgagtgtgttggcttttttgctgttatggtgtggggttgctttttcggtcgagttcgtgtttgaagaacaacccggatcgtgcctgttgaaaggcgatggaaaaacgtggatggccacgatgatggccgctttcgatccggcaaaacgcgatgagacatacaaagtctacacacatatccacgattttcagggcatcgccccgattaccaagggaccgggcgggaaatatccgcatcatcgcggtatgttcattggctggaaggatgtcgtggccaacggtctccacttcaatttgtgggaaatggcgaatacctcgcagcgccatgtggcgtggctggaacgcaaaggagggctggactccgcgcggcaatcggagcgcatccactggtgcgatccggagggaaaagtgcttatcgaggagacgcggacccttgccgtccggcccggtcccggcggcgtgcgccttttcgattttcagtctgtgcttttggccccgtccggcgacatccagttgcgcggggatcttcagcacgccggcatgcaggtccgcatggcgcaagaagtggcggaccatgaagattcgacgaaatacattttgcccgaaggcgcccaggaactgccggacgacaaggtcgtgggtgcatggtgggtatgttgcagtccggttgtgcgcgatgtgcgctattgggtcgttcatatgacaccgtccggtcatccgttgggtcagccggtgtattcgattcgccggtatgcgcgattcggtgcgttttttgagccggacttgcaggccggaaagccatcggcattctcgtttcgcattgcggtatcggacaaggaactggaccgcgccgcctgcgaatcgctgtatgccgattattgcaagcccgccccctgattcgattcggagacttacgcgtgcgcaagttggcggtcacattctacggcatcattcacggatcgttgatcaaggaatgcgccgtcgtgccggaacagcgcgcggaactgtgcatggaaggcgacccgtggctggcgacggtttcgacgccctacgatccctccgcccattcggatacctgcaaagtctttacgcatttgtatagtccttgcgacgggctgccgattacaaaaggggcgggcggtttcgattcgcatcagcgtggcctgcatatcggctggcgacgcacggaagtggaagggcggaacttcgacacgtggcatatgacggattgttcccagcgccatggcggatggctggctgaaccggggcatgtggccgcccacgcgttcatcgtggattggtgcgacgcgggggggcggcctttcctgcgcgagtttcggtccgtgttgtgccgccgcgcgcgatatggcgcgcgcatgttcgatttgcagtcgcggctggccgccgtggaccgtcctgtcgccctgcgcggggacccgcaccatgccggtgtccagattcgcctggcgaatgaagtttgccggcggccgtggggcacccggttcgtgctgccgggcaatgcacaacgccggcgcaacgatgtcgtgcgcgatgcgctctgggtttgctgcctttccactattcgagacaagcgccatgccgttttgcacatgacccatcccgccaatccgggtctcgaacatctagtctatgggatacgcgcctatgggcgtttcggggcctttttcgatgcggatttgaagcccgggtttcccatgcgcatgcgtttccgaatcctgtggaccgagggcgaattggacagagatgaatgcgaggctctctatcgcgagtacacctcatccttctgaacattacaagcccggcaaggcaatgataattcccgccttgtgggcaggatgaacgatggggaccccatggacttgattcggcgcctgatatcttatcgtctccgccgcggtccacggcgtcgctggtgtggacgtttacggtgggaactgtcgcgctggggttcgcgggggctttcgggaacccggatcgtctcggcgggaatgtaacgggcgagtttgtcttcggtcgagttgtaacagtcgcagcggggacaccttgaaagccgttcggcctgctcgtcaaggtagatatatccgcaaaacgtgcaccgccagagaaactgtttggttaggaccgcctgtattctccgggaaacgatttccgtatgcgtccagatgacaatggccagcgcgcacagcagggcgctgtaaaaaacgagcgcggaggtaagcgaaatctggatcatgatgatggcgcccctgctttttcgtgatcatccacggtctttgccgatggccgtttgccgttcccgtcttcctttccgggtgtcgccagcgtgaagagtccggcttggggcgtcatgggtatgtgccgcattgcttccctcatgatccgccctcgacctcgacgaataacgtgccgcgttgcaagtggacgttttcaatcggttcgaattgaaaacggggaagcacagtttggagttccgagacgacgccggtggcgtcttcgatggaagtttggacgttttccacttttcctttttcgttgacgctgaaaataatcgaaatgggagccgtaagccgggccggttccaggcgccacagggaagcgatcggaggaacaaacagggcgcggcgatcccgtggatcggacatccattcgacgaacagcgcaattccgggcgccggacattccaaccgcacgcggttgggcgttgtttgatcggttcggggccatgcccattgcgagagcgcggggccgattccgcgcaattcgctggtgaaccgcgcccatgaatcgggcgtgtcggcctcgcgcgtctcgaagagttcgctgaactgggaacgaatcttaagactttcttccgggctgcgcaagaccggcagggacgacgcgagccggggtagttcgacgggtggcagcaagtcggtatccgattcatcggccaacgcgagcagattcgggtaccgatcggtcggcatcggctgatcgctgtccggggttgggggttggacaaggccgatggtaaattgccgtgtttcgggttttggcagaagaatcacgatcgaaaaaaccgataccatcgaaagatgaaacaggaccgagacggcgagtgctatgttaaaagcggatgcgcgcggcatgacgcgttaccgttgcggcggcccggcgggacgggcggcaatcgtgcaatggcggatgccggcgtcgttgaccagtccgagcacttcgatgagccgcgcgctttcgatgcgggcatcgggccggattacgacggtgatgtccgggcgttgcgcatgcgcctctgcgagaatgcgcgaaacttcgtcgaatccgcccacctgctcctcattcacaaaaatcccgccctcatgcgaaagcgtgattgacaagtctttttcctcgtatgcggacggcccggcggcctcggcggtcttgatggtcacggggaactgcgtggcgaaggttgttcccagcatgaagaaaatcaacaggttcagaacgacgtccatgagggccgtcatatcgatcgtggggcggatcctgggcttccgttccttgcggaaccgtatgaggcgtttatccgccgccgcttgcatcatggggcctatccgtcctcgccggttcggtgcattgtcatcaattcaacggcttccgatgcgccgacttccatttcaacgatcatggtgtccacgcgcgtaacgaaataattgtacgccaccatggcgggaatgcccacaacaagccccgcaaacgtcgtgatcagggcatttccaatgccttcggcgagatcggaagggtttaccatgcctcggcggttctcgatggccgcgaagcatttgatcatcccttggaccgtacccagcaggccgagcaacggcgcgacttgcgcgcaggttcccagtccggcgagataacgttcgagacggggtatttccagccgtcccgcgtcttcaatggcctcgcggatatcggttttggtgcggttgtgcttgaccaggcccgcttttacgatgcgcgcgatgggcgcacgggtttcgtcgcaggtttgcaacgcctcctggacgcgatcctgccgtagcgcggcgcggatcagatccatgaattcccgcgtgacgactgtgatgcggcgcagcgtgtagaagcgctcgatcgcgatggccaacgcgacgatcgagcaaacgaaaatcggccacatcaccacgccgcccctgccgatcaattcgtatgcggtgttgtatcctgccggtaacatggcttcaagcctccggtaagtctaaagcgtgacgagcgtgcccacgcccttgtccgtaaaaatttcaagcagaagcgcgtgtggaacgcgtccgtcaatgatgtgggtgcgcgatacgccgtgatccagcgccttgatgcatgcgtccactttcggaatcatgccgcccgcgatgattccctcgcgcgtcaactgggccacctcgccgtgccgcagatggtgaatcagcgaatccgggtcgtccttgtcgcgcagcacacccggcgtgtccgtcagaaagacaagtttttcggcctgaagcgccgcggccacttcgcccgcggcggtgtccgcattgatgttccacgtgcccccctccgcgtctgtcgcgagtggggcgacgacgggaatcatgcctgccgcgcagagcacgttgaggatgcgggcatgcacattgacaatctggccgacatgtccgatatcggcgccgtcctcgaactcgatctttcgcgcgtgcagcagattcgcatccttgccggaaaggccgacggcctgcccgccggcttggttgagcagcgtgacgatgtccttgttgaccgttcctgccaggatcatttccacgacttcaatggcggcgtcgtcggtgacacggcgcccctgatggaacttggattcgatggccagccgtttcaacatgccgttgatggccggtccgccgccgtgtacgacgatcggattcatgccgacatatttcatcaacacgacatcttccgccgtgctcttgcggatgcggggatccgtcatggcgctgccgccgtacttgataacgaccgtcttgccctcgaacttccgaatgtacggcaacgcctcgaccaacaccgatgctttttgtataaccgcttccatttttctccttctgtcgtgcccgcaagcgcctcgggcggcaactacgtcctgtaatctgcattgatttccacgtagttgtggctcaaatccgatgtccagaatacggtttttcccggtccatttccgacttccacgcgaatgcggaattccggcttgcgcatgcaggccgccgcgtcttcttccttgtattcggccggcatcccgttgcgcatgacttggatatcgtcaatccacatgcacagtttctccgggatgaacgatgcgccggaatagcctgcggcgcaggcgaaacgcccccagttggggtcttgcccaaaaaaggccgtcttgcacagttgggatgtcgcgatggcgcgcgcgatgatctttgcgtcgttgtcggaagaggcgccattcacggcaatttcgacgaattttgtcgcaccttccccgtcacgtaccagcgattgggccatgtgaatgcacacgtcgcgcaatgctgcggcaaagcgcccgaagtcgtccgtgcccggctgtagaaccggcgtgcccgatgccccgttcgccaaacagatgaccgagtcgcttgtgctcatgtcgttgtccacgcatatttgattgaaggatacctcgacggattcgcgcagaatcttggcgagcggctccggttcgatggcggcatccgtggtcaacaggcagaacatggtggccatgttgggcgcaatcatgcccgcgcccttcgcgatggcgcccagccgcaccgtgccgcccgaaagcgctagttcgacggctgtttctttcgggacggtatccgtggtcatgatggcggcggcggcatccgcgctgccgtccgcgcgcagcgatgccaggcattcccgcacgccgttcgcgatacggtccatcggcaacgggaggccaatgactcccgtgctcaacacgcagatctcctcggatcgtgcgccgatgccttcggcaaccatttttgccgttgcctgggcatcggcatagccgcgatcgcccgtgcaggcgtttgcgttgccgctgttcgcgaaaatcgcccgcgcgacgccgcgcgtgcatacgctttcactccagcgcaccggaggcgccttgaataggttgcgcgtgaatgtgccggccgctgtcgccaatcggtcgctgacgatgagcgcgcaatcctttttggtcgaattcggcttgatggccgcagcgacgcctgttgcttggaagccttttgccgccgtcacgccgcccgggatggtcgtcatggcatcatccccgccagtttaaggccggtcgtctccggcagcccgaacatgacattcatgcactgcaccgccatgcctgccgtgccgccgacgaggttgtctatggcgctgacgataatcaggtttttggtgcgtttgtccacgacccaaccgatatcgcagaaattcgagccacgcacataacggatttccgccggtttgccttcgccgagcacgcgcacgaacggctcgtccgcgtagcgttcatagcaggccgccacatcgaagatttccttgagatgcacggttatcgtgctgagaattccgcgtgtgtaggcgcctacgtgcggcgtgaactgcaccgtaaaggccttcagcagctcctgttcgatttccggcgtatgctggtgatttccgatacggtaggccttgacgttttcattcatttccgggaagtggaaagcctccgccacggcccggcccgcgcccgaaagacccgaaatcgcgtccacaacgattggtacatccttgtcaatgggagcgtccacgagcggtcgcatcggcaagatcacgcttgcagggtagcaaccaggcgccgccaccaattgggcgtctcgcaattgatcgcgataatagggaacaaggccgtacaccgcttcccgcacccattggcccgccgtgtgctcgaccttgtagtattcggagtagagacgcagatccttgatgcggaagtccggacccatgtccaccgtgcgaacgcccgcctcgcgcaatgccgcgcccaacgccatggacttcgtgcccggcaccgcgatgaacaccacgtcgcacttcttcgccaacgccgccgggtcgaatttttcgcataccacatccacgagtttaccaaaggccggcaacaattcctggatggattttcctgcctcgacttccgccgcggccaccagtttcgcctcgggatgcaaattcagcaggcgtatcaattcacgcccgccgtaaccaatggcgcctacaagacctacacgtatcatgaaatacacctccgtgggatggattggaaacagccggattatagtccgctgtcggcagggcaatcaaagaaagctcacacattcgacgaattttctactgcagcagccacgcgacaccggcgccgcccaggatgacccaaggcaccttggcgcgcaggagcaaggccgcaaacgccgccgttccgactgcggccaacgatggattccagggcacttccatgccgagcatcgcggtggtggcaagaaggaggccgacgaaggatgccacggctccacgaagcacgcaccggactgcgggacggcggcgcaggcggtggaattccggggccagcgccagcagcaccagaaacgagggaaggaagatccccatggtcgccgcgcaggccccggccagcccttcgcgcatgtagcccacgaatgtggcggtgatgatgatcggtccgggcgtgacttggcccagtgcgatgccgtccatgaatgtccgcgcgtccagccaatgccgggcatccaccacctcgtgcagcatgatggggagggcggcgtatcctccgccgaaggcaaacaggtcaatccgcatcatcgtgaaggccagattgaaaagcgagcggtccacgaagaaaagcaccaccatgccggccaacgctgcggacacgacaagcgcggccgcccgccatgcgtttctccgttgcgtaaagggcgcgggcgatcgcggcgattcttcgtcgcccacacgccggtaaagccaaaatccggccaaggccgcgacggggatggcgatatacggaacgccgccaagtccgagatagatcgcgacactgaaggccagcagtacgtcctgccgatacttcacaaattcccggccgaaggaccacgccgcatgcgccaccaaggccacgaccacagcctgcaatccgttgaacattgcaagaatagacggcaaattgtgtgtccggctgtacacggcggacagggcgagcatgagtagaaacgccggcagtccaaaacccacaaaggccgccagcgccccgcgaatgccgccgatgcgcaatcccaaataccccgccatctgcattcccgtggcgccgggaatcgcctggcacagtccgatgccgtcgtcgaatgcctcggcccttacccagccgcgactccgcacgagatcttcgcgtagatgaacgatgatggccggtccgccgaacgccgagcacccgagaatcaaaaaggtccggaatatttgccacaggtttggattcggcatgggtcgaatcggttgctggtttgtttgcatgtcctggatgatatcatttttcccgcatccaattttggtattgccgggtagggacacctctgtcctgtactcaatccgctcgtatctgcgtcatccgcggaaggccatgcggtcaaccgaggacgcggctattcgtagatgctgaaaagatgaatggggaatcaacgcaagcccgatttcagccagccgcttgtcacgcctcgacggtttgccgtttggggagacgcaccacaaatcgcgtgttcgaggacgcggcgtccaagaacaagtcgccgtggtggttttcgaccatccggcgcgaaatgctcaaaccaagaccgatgccgccgatggtctgtttcgtggtgaagaaggggacaaaggccatttcctgaagatccctgcccaagccgtgtccactgtcggttatggcaaatcgaatagtcgtcccttcatcttcgacgtcgagccgtatccatttttccggcaattctttgacggcgtcgtaggcattgttgatcaggttgagcagcacttggcccaattgggcagagcggcattcaatatggagttcattcggtatgggcgacaccgtcagtgtgatgccggcgtctctacagcgcgccatgcacacttccagtgtttctgtgacgatggtggcgaccgattcccgcacgaatgcgtcggacgagccgtccctggacaaattccgcagtccttggacaatatgttgaacgcgcttgacattgcgcacgatggtcttggtcacgtttgcccggtattcgtttgaaaggcggggatcgtcgagacttcgttcgagttgttcggcgccgaccgaaataatggccatgggattgtttatctcgtgcgcgatgccgcttgccatcgtgcccaaggccgacaggcgcgccgcgttcagcatgagcaactgctgttcgatgattaggcgctgcgcctttacgcgttcggtgatgtcgtttccgatgcaaaggatttcttttatgcggccgttttcgtcgcggatcggccggttggtccacgatatccagacgatgtccccgtttttccggcagttttcgttttcattgcacagatactgttccgggtgttccccgatgccctttatcattgcctcgtgggcgcgcccgtcggaatcttccgggcgcaggatggttccgatgacattgcgtccgatgatttcctcctcggtgtacccgaaaaattcctgcgcgaaatgattgaagaaaaggatgttgccgttcacgtccatgcgcatgatgacgctgttggcgctctcgaccagttcgcggtatttcgcctcgctttcgcgaagggcctcctcggcttttttgcggcgatcaatatcgcgtgtgatgccctgaaatccgagcaatttgccttccgaatcgaacaggggcgccgacaccgtttcggtccaaatcaaggttccgtcctttcggatttgctccagttcataggtcgcgcttcccggattgattccctgttccatgagtttcaaacgctcgctgaattgcgccttgaacgaggcaagcgaccgcggggttataaattccaaaacggatcgcccaatgacttcttccgctttgtatccccgctgccgttcgtccgccgggctgacatacgccgcgcgcagatcgggtgtcaactgccaaaaaacatcgtccacgctttctatcatgaaccggagggattcctcgctttctttcagcgcctcctcggcctgcttgcgttccgtgatgtcgcggcccaccgactgggtttcgatcaggcgtcccgttttatcgaagaagccccggttgacaaactgcatccagcggatttcccccgtgccggcatagacacggttttcgataacaacgacggggttgtccggcgacatctttccgagttgctcttcgatgatcggacggtcatcctcatgcgccaggggttgccagggtttttcaatcagatcgtttcttgttttattgaaaaagcggcaaaaaacgtcgttcacaaacacgaatgtgccatcgggccggaaccggctgatgatttccgtctgatcctccaagacagtccggtagcgttgctcgctgtcgcgcaaagccgtttcgatgaggcggcgttcggcgatttcttgttccaattgccggttgatccgcatcagttcggcggtgcgttcggccacgcgattttcaagttgtgctcgcgtctgctcaagctcctcgaacgctttccgtttttcctccatctggacacggagcgtttcctgttcgacttggagccgttgcttggcccggtgggtttcatacactccccagaagaggccgccgatgaacaatacaatgccggtgctcatgagcggttccttgaccagatggaacggcctcacgaccggacgcacattgccgccgaaagatgagatgccatccatgacattgatgatctggccggccaagataagggcgatgccgatggccgccagaaaagtgatcggccgtacggcatacacgacggacaagacaaacgtggtcccaatgcccaacagaagtagactgaaaaaagtaatggtatcggcgataaaaaaactataccagccttggtaaaagcccacacggcccagtaaatgaagggaaagaaccagcgacagtgaaatgacgacataccacgcgacgcgcggcggcaaatcatattttgtcgccggagatgccccttgatcggcttccgccttctccggttcgttcccgtcacgcctcatgaaatacccctgccctgttcgggccgttgctccctgctcctacctttcccgtatgccggtttcattgtactactttctcgccaaaattgaaaggcctctgtttgaaccaccgcgtaaagcgtcgtagactatattccgccaagtgcgagaggagaagcgccgatgtcggaaacgaagaagtttcgcgtgggggttatcggggtgggttcgattgcgcaggcgtgccacctgccgggttatctcaaagatgatcgggcgcaattggtggctttcgccgaccccgaaccggagcgccacaaggagatggcgctgtcctatggcgagatgcggggctatgcgcattaccgcgacatgcttgcccgggaaaaactcgatgtcgtcagcgtgtgcacgccgaacaagtatcatgccgaagccgtaatcgccgcgctggaggcgaaatgccatgtcttgtgcgaaaagcccatttcaacgacgctgcaagaggccgacctgatgatcgccgccgcgagaaaagtccggcgcaaactgatgattggcttcacgcaccggcttttcaatggcccgaagaaatgcaaggaactactcgaggagaagacgctgggaaaaccgttcatgatccgcgtgcggtttgcgcatggcgggccgtttcccggctgggccaagagtgattggttttaccagaagaatctggcggcaggcggcgcgatgctggacatgggcattcatgcgattgatttatgcctgtggcttttcggcccgatcgtggccgtaagcgccaaggcggcgacgctcgtcaagaaaatcgaagtggatgacaatgcgttgttgctgctcgaattcaaaagcggcgcgctcggatacatcgaagtgggctggaccagccgtcccggattcagcggccttgaaatctacgggaccgagggatccatcatctgcgactacacgcggggcgtgtatctggtggggggcaaggcatcggcggggcgcgacggcaaacacgaatggaaaacgctggacaaatcgcccacggaagggggatggtccacggagatgggctactggctcgatgtggtcacgggggtggaaaaactgaccatggacggcagggccggacgggatgcgttggaagtggcgctggcggcctacaagtcgagccagaccgccaagcgcgtcaccatcgaataagccgcctgcaacctttcgcgcggcgcgggtatatcattgagaaggagggttgccatgattcgcgggctatttgtttcgattggcctttccgtgctggttcttgttccggatactgcgttggcgcaacgcgagccaagggctttccgaaccatcaacacggatcaatacgaggtggccgttcacaagaatggcctgattgacattcgggtgaaccggatcgaaaccattgccaccggtctgtatccgatgatctggattgagggggaggccgcgccgaaaccttttcccgttgatgcgcgatacagcaaccgcgctcccgtgaacaaccgccttggagaaggacaggggatgtggttcaagaaggggacgctggattggattgtggagacgtaccccacaaaacctttcatgacgattcaagtggcgttcgaaaacacaaccaaaaagcccgtgacgatcaaggcgctgattccatgggcgcttggaggcgagaaaaagggttcgctcaatctggggttgggttccggcgggtccgttattcttgaaaacggccgccatctgggtttgaccgacgaagttccccaagtcgtcgccgggaagacgcaatgtctaagcaattgcacggccttcaatccgaccagcggattgtcgttgacggcgggttttctgaccatgcggcatgcgtacggacgaatcatgcttgaattggatgacgatccgacgagggccgtcatgcgcgccgactgtatatttgatccgccgatcgaggttccgcccggaaagcgcctcgaatcggagattttttatgtggcccttactgaacgaaaccccttcgacgggttggagcatttcgggcaggccgtcggcgcgttcaacgatgccggcccgcaaggtttccggttgccgcacggttgggattcatggaacaccgccctcaagagcgacatcaacgaatcgaacgttttggcggcgttggatgtgttcgatcgcgatttgaaacgttacggttggacgcattttgcgattgggggcggttggcagcaggccacgggaacctgggaaccggattccgcgaagtttccgcatggcatgaaatggctggccgaccagatccattcgcgaaaaatgacggccggcctttggttggatccgtttaccgcccatgtaaacagcgccgttgcgcgggaacatccggattggttgcgccaaccggccgaggcgtaccgttccatgctggacccggatgatcgcatcatagatgtgacaatccccgaggcgtacgcgtgggtgcgggatctggctgtacgcgtcgggaacgattggggattcgacacgttgcagcagggcgattttgcatgccggttgctgtatgcggatcggtacgccgcggtgggtgttacgcgcgtggatgtgtttcggatgggcgtgcaagccttgcgcgaagggctaggcggggaatcgttgattacctctttttccccggcgcaggtcacggcgccggtttggcgtcgggagacaggccggaaaccttggggatgtgtcgaggcgatgacgaacgccgcccggcgctattattttgcgccgcattgttggatagccgacacggactgttcctattttgggattgattccacacgggaacggtggagtgtgggccatagacctcccttgtccgccgaacaggcgcaggcatggctgacggccgccgccctgaccggcggcgtgatcaaaatgggcgattggcctccggacctcgacgccggacagcgcgcccttttgacacggcttctgcccaccattggccgctctgcgcgccctgtcgatctctttgaaggcaaaacgcctgcgatttggtcgcttccgattcaatgcgccgtgggatcatggcatgtcgtcgccgtattcaactggaacgatgccgcccctgccaagattcccctcgatttcacaaacctgggtctcaatttcaaccgctactataccgtctatgatttctggcgcgacaagttctatggcctcgccaaggggaggctgatgctcgacatgccgccgggcagcgtgcggctgctgggtctgcgagcctatgagggccgaccgatgtttctcgccacggatcggcatttcacgcaaggggccaccgatttcacccgcctcgaatggaatgcgcaaacccgcctcttgtcgggaacatttaccggcattgcggagacggattataacctgcgtatttttgtgccggacgaatatgcggtgaaatcgtcctattgttcggcggaagcgcccaaaacggaacaggacgggaaagtttacaaactcggttttcgctgtatcgaatcagcaccggtcaactggaacgttcagttctgaaccgcaaggcggtggatttcccacgcgatcgcgccgtttatcaggcccgacgcggcgagcaagggcacgtcgtagccttcgaggggcacgcaggcgtcgggccaatcccacatgggatcaatccatataacgccgcgatcatgagcaaaatcgcgttcgtgccggagcgccgtgaaagcgacacgggcgccggccggccgtgccttgcggaggagatcgtccggcggctgctggtatccgatgagcacaatcatgtcgccgggacgataaacgtcatcgggtttcggcgacgtgcggaatcccgcgttccacacgtccgaatgaaacagttttccgatgtctgttttacccacttcgtccggaaacaggtggcccatgctgtacatgaacaattgtgcgccccgctttctcgccgctcggcaccatgcgcctgttttgtcgagttggcggcgttgttcgcgatccacgcgatccagcatggccttgattgtgttgatatagcggttggcgatgacacccgctgccacgggggggacttctttatcgtcgtgaaaggcaatatcgccgttcttgtactgcgtgatgcgcgggatgccgctgtatgagccgatactttcgtaaatgaccggcattttgccgagccgggtcaacgcggcgatcgtttcgccggtaaaaatccatgcgggaatggcgtttgccagcgtgggggagatgcctgcctcttcggcatgattcggaaaaaacggccattgatcatgaaccggccttgaaccgaaggtcactacaagcgcctgcgtgtttttcagggggtcaggcatgccggcgccgatttcgggcgtgtacaaaaccacatcggcgggatcaggcggctcgcttcccagtgcgcgaatcatcataaagccgccggcgcgtccgctgatttcgctgacgagcgagggctggcccgccgcccatagtttccctccgttggccagagcggcggcggcccgttcggcaaccggctgcatggcggataggtcgccccgggcacattcgatcgcatgcgccacgcgcgccagatacgaaccgttgatcggggcggccatggccgcactcattatgccgataatcgccgtcatcatgcgcggaaaccctttacttgaaagacagtcggaacccttttcccgaaacgactatcggatccaccgtgggaacatcgcccgattcgggcaatagaatccgcatgggggaaaaatccagaatatctttcctgatgtcaatgccgggcacgatacgcaccagttccataccgcgcggcgtcaactggaaaatgcccacattggacacgtaaagcactttcttgcccgtggcaagcgcttggcgtccactgaaggtaatttcgtccacattggcgatgaatttcggcttgccgtattcgacgatgcgcagggcattgccttccagacgaatctttccacccagcatccaactactgacgaagataatcgtccgcgccgcggtcgtgaagtcaatgaatccccccggtccgacgtaattgattgcgccctcgccgcgtttggaaacgttgacgtttccatcgctgtcacattgcagcatccccaggatgctcacatccaggctttcgtagcaccgatggaaaatttccgcgctggtaatcatctttttgggacatatcgcagcgccgaaaaagacgcccggcgctggcaatccaccaatgacgccgctttccgtaaacagggtgatgtcctcgtagagtcccgcctcgtacagcagccggcaaacttcttccggcaggccgacgccgatgttgaccaggctgccccggcgaacgttttccgcgaaagccgtcgcggccaagcgcgcaagcgaatcgtccaccgctgtgcgtctcggcgtgatgcgcagagtttcgttggcgtacttgagtttggcaacgctttccgcgatcggcatgtcgctttcggtagtgaacatcggccagtgtttgcgatgtttgacggaacccgtctgttccgtgcgggggtagacaacgaccgcgtccacatccgatgccggcagaaagatatcgtccgaatttttttcgacgacgtacccgacattgacgataaccaatccaccgtttgcccgcgcggcctttgcaatttcgcgactctccgcgagcatggccgtgtgcctcatgtagatattgccttcgcggtccgccgatggcgcgttgaacatcgcgaccgttatcgggggaagccggtagcgcaatttgccgttttcaaccgcaacccattgttccccggcgggcggtgtcacgggcgatccgcgccccacgcgcggatccatgaatgtgccgatgccggtgcttgtcaacagggatgtttccccgtggccttggccctcgatgaggaacgccataaccccttggggaatgcattggagttccagttttccttggtctgccagacgaagcatcgccttgaaggtttcgagatgtccgctgaaaaaacgcgtgcataagccgggaaggccgagttcttccagcgatcccggcgcgcggccccgagcgcccatgcccccaatcgccatgacggtcaaatcgcgcgggtggcccgtttcctgaaacaattcccgaatggaccaatacaggatggacgcccattgattggcgcccaaacccgaagcggccacgacggcgccgtcggggatcaatttgacggcgtcacgcggtcccatgaatttcggattgtcgggaatcgtgaaccgataatgcgtgtcgcgccggttccatgtcagccgccatttgagaacgtgatacaatacggaaatcttggaaaatagtgtcatgaggggtacttcctctttgaatccgtgacgtaagatagccgcttcaagaccgaaaagcaagagatatcggcgcggccactttacatggccgattccgttgcgctaccgtacccgtcaaaccggaacgaaaaaaaggatcgaagtatgaaagcgcctgtcgggattggggtattgagttttgcgcatggccatgtcggtgcgtatgtggacgtgatgaagaattttgccgatgtgagactggtgtcggcatacgacgacaatgagcaacggggcaagggggtgtgtgacaatgcggggatgcgctacacgccgcatgtcgaagatgtcttggacgatccgaatgtgcaggcggtcatggtgggcagcgagacatgccggcacgcagaattgtgcgtcgcggcggcgcgggccggaaagcacatcctctgccagaagcctatggccctctcgctcgaggattgcgaccgcatgatcgcggcggcggaaaaagcgggcgtgatgcttgccgtggccttccagatgcgtcacgacccggccaacatccggatgcgcgagattgtccagtcgggcgaattgggccgcatcgcggtcattcgccgccgccactgcatcggcgtgctgctcatggaatcgttcgtcaacgggccgacgcattggcatatcgaggccgacaagaacatgggcatgttcatggatgacgcgacgcatcccgccgactggttccactggatgctcggcaagcccgtcagcgtgatagccgaaattgacaatgtaatcacccatgtcgcgcccgacgacaacggtgtggccgtgttccgtttcgcacagggggaaatggggatcgttttcaacagttcgacggtcatggcgtcggaaaacacgaccgaaatctacggggagaaaggctgcgtgattcaaaattacggggacgcgccgtcgtgcgacacgcggctgcctggcgggatagccgtcaagatgttcaagtacggcgagggcaagtggcaggacctcggcgttccgattcctcccggccacggttgccggattcaagccgtgccgaggccctgggtggacagtcttgtgaacgagaccccgccggccgcgacgggacatgacggccgcgtggccgtcgagatgatcctcggcgcctacaaggcggcgcgtgaaggccgccgggtaacgtttccgttatgaaaggatccatgacgggattgcgggctgtttgtcgtccgcaacgggaagcgttgatgcccgtcatggggaaaaaggcagtatgaaggaattcgatctcgacacgatggtggatgtgggttgcgccacgatcctggaagtgcagcagaagatccagggcatggtgatagacaatccggcccgggcgctggatccggtcattgtcggtgcgcggaaaaaggccgcgttgcgcgtggatgtcttcgcggaggattacaccgaggccgaactgcgcaagaaattgaggaaataccgcccccgcgtgatcggggaagagagtcttttgaaggaggatctcgatctatcgcgcgaggatcgcctggtcgtgctgctcgacatgctcgatggcacggatttgctcgagcggggcttgtccaactggtgttcggcgatggtgttctattatccgcccgaatgcaggattttggcgtcgttcgtcggcattccgaacgatgccgtctactttgcgatcgaggatcgatcggcgccggtgcggaaatttctctggcatgtccgccgcggtcagccgcgcgtcattgacgtgaccggcccgtcgtccgtcacggccttgcaggaagcctcgctgtcgttctacggccagcagcccgccaatttcatgtccgttgcgggaaacaggcgttttgccgcgaaactggctgaattcgaaaccgtcaaggacgactcattcaagcgcatgcgcatctataatttggcgggcaatccgatgatgatgaaactcattgacggatccaaacgcattgacgcggtgttcgatttgctggggcaattgccgcacgacatggcgcccggcgcctacatcgcccgccgcgccggcgcaatcctgtgcggcctcgacgggcggcccattctggaagaagatcttgcgcgcatgttgataaaacccgcgcacggggcatcgaaaaggccgtatctgctggccgccaccgagggattgaaaaacgaatttctcgccctcttcggaacggatgcgtgccgggactgagaagtcccgatcctttttttgcatcaatggcgtgttatgcgccggccgcttcgcgcaaggcccgcaggacggcctgcgcggcgccgggggccggatcgctgagcaccggcaggaaaatcgtccgggccatcgcgcgttcggcattcgggaaatcgccgggacggtagccggcatagccctcgctcgcgcacaagggaccgcgattgcgcgtaaaaatatcgaagcctttggcaaacagcggcaagtcgtgcaggttcggatacggcgaaagcgacgcgcccacgccgcgcgccttgatccgctcgacgtaatccgcggtggacagaccccccatggcctccggctcgtgaatgattgggaatccataaaaaccgccgcgctcggcgccctcgtggaccgtgatggggcgcaatcccggaatcgaatccagtccggcctccacttcggcgaaatacgccgcgcggcgccggttcaattccggcagttttttcaattggaccgccgcgatgccgatgcccaggggatgcgcccggaacttcatgcccagtccgagcggttgaagctccgcatattttgccccgaccaaatcaatgcccgcgatgcggttgacctgtccgacaaggcatgcccgctcgaacacatcgaggtcgtccgtggcgatcatgcccccttcccccgcgctgaccgccttcgatccctgcaaactccatgcgccaacatggccgatcgcgccgcacatgcgccctttgtactttgcgccgtgcgcgtgggaacaatcctcgaccacggcgacgcccgtctcccgcgaaacggccatgatcgcgtccatgtcgcagacgtttccccaaagatgcacggcgcacaggcaacgcgtccgcggtgttattttccgtttcatgtcggccggatcgatcagaagcgtatccggattgatgtcgcagaaaacgggccgcgcgcccagcagcagggccggcgcgatgctgcaaatccaagtattgacgggacaaacgacctcgtcgcccggcccgactcccagtccgaaatacgccgagtacaaggccgatgtgccgttcaccaccgacacggcgaacttcgtgcccatccacgcccgccacgcctgttcgaattcgcgcaccacgggcgttccgcccgaaagctcgtttcgacgaaccatgtcggcggccatcgcggcctcgtcctcgccgatttgccgccaccggtcaagctcgcccgccgcccgcgccgtctgcacgaacgcacgcggaccgcccggattgacttccacgtcgagcgccatgttctttcccgatcgcgtgatgtgaaccgctattttttagcggcgtcttcctttggcacgaccttgtcgaaattgggctccgtgccgtccgttccttcttccatcaaccacatggccgcgtccacgatacttgcctggaacgtcggattttcccaaagatcctcgcgatggccgagggcgctgaaatacaccttgcccttgcccaacgcgctgcaccaaatcaccggatacggcgcaatgcgatacgccgcttgttttgcccctgcctcgcccgggtccagcaacgccagcacatgcatcgtttccgtgttgaaatttttgaacagataccactcctcctcgaaactccaatccgccggaatgctcgccatcgccggatgcgccggatccacaatcttcagcgtgcccttgaactgcgcgccatgcgtgacgaattcggcgcccaccatcttcaaatagggcgtcacctcgccgccggccggcgtgtgaaacgtgtccgacgcggaatgaaagcccatgaaacgcccgccgttccggacccactccaccagttcggcctggcccttttcacccatcggcgcgccgccgtccttgctggggcgcgtcaagtcgccctgcgtgtaaaaacacaccagatcgtagttcttgagattgtccgcattgatcaggctcgcatccttcgtgctggtgaaaggcgacccgttttcccgcgcaagccgcccgagaatcgtttccgccagactcggctgatcgcccttgacggccaccgggctgtgctcgaacccttccgacttgctcaagaacaaaatccgcggcggcgtgatatcctgcgccacggccacgaaagccacacccaagagaaccgctgtcgcccatgccgtccatgcaaccattcgacacatcgtcctttcctcccatgcgttttccatcgcgttgtccaaccggcgtagcataccctcccccgcggcgcgggtcaattcgccgcatttgtagtgtattcctgcacatgaaatttggaacgagcacgcaggtaatggtatatagttcgatatgcgggcaagctgaaggattctaatcgacaataggtttttcagtgcttcagaaaggggttgttgattatgaacgagtataatttgctggatgaatcgtggattcccgtactataccgaaacggctgcttcattcgcatcggcatccgcaaagccctcgaagacgcccaccgcattcgaaccatcgccgcaagcaatcccatggaccgcgtcgcaatccttcggttcctactcgccttgctgtattggtgcaagggcaatccaccggatggagcgaacgcaaacactggcgatccgtttccaacggattggttctcgatgcttgatgccaagagagactgctttaacctcctgggtgaggggaagaggttctatcaatacagaaaggctggttctggctcggaaaagaagcttgccgcaaactatttggcacaagaggtgcccaccggcacgaacaaatggcatttccggcatgcgacggacgagaaggatggcttgtgtcccgcatgctgcgccatgggcttgctgcgactcccactattcgcaacatcagggggacgtggcaagccgccaggcgtcaacgcgaaaccgcctctctatgtcataccggtcggcgattcgctcgcaaagaccttgcggctctcgtggaagccaatgcccaatctgggaacaccggcttgggagaagccggaaatggaacttctaaagacgggggagttgcccttactgatgggattcacttggatcccgcgacgggtctggctagataatcccgacaaacccgaaacaccctgcatatcatgcggtcaggtctgccgattgatccgcctcagcgtcttcgctcctatcggaagcaccaaaacgcaggaaggcggtgtaggtcgcttctggcgcgacccacacgttctctattccacttcagccaatgacgaagtaatctcgctgcatgccgccgacgtgcgcgccgctccggacgccgcagcgggacagtgggcaagaatcatcgctggcaatcagaaagtgcggcaagcagatgatcgaatcgggacttggattgttggtttctcgacagtgaacaacgatacgtatttggaggcgaccgaaagccttgtgcgtgacccattcttacccgaacagtcggaggccatcattgccagactggaacgatggcaaaaggaaggatcaaaacttgcccgcaaggcgcgtcccccgaatgagaaggttgcctcgcgaaagcatgtcgaaatccttccaatgctcgatggggttcgtccacatgtcgaaagcaaggtgttcgcggacgtaggcgagttgcttgtgggagacgatgaagcatgggagcaggcggcggctaagtacaggccaatgatgaggatggtagcccgatcgcttgcgcccggcttcacgaccgaggccctacgccgtcgccggaccatacaattcattgtccccaatatgaaacccaaacctgaaccggtcaagaaagatacccggaagaaagggggcgcgagcgaatgacgcctaccgagatgttcatcaaaaccctgacgaacctcaaaaccggcgacctcagcctcctgcgcacgcacgcaggacaaggtctcgatgagtcgctggaaggattcgacctcttcaccggaatctggtggcccttgcgcgagaagaatcaagctgcaccgcgccgttcagtggcatggctgatcgcgaagctctacgcgttctgtcccatccaccaggagcggggatgcgcgctcgccgcgcaattacgccgttgccgacccagcgaacagttctttaagaagtgtgacaggctgctcctgttgccgaacgaccggttggaaccagctcttcaatgggcaatcggaacccttgcttcaaataaattgcggctcgactgggtgcaactaacggacgatttatccatttgggaacgtgaaacaacccgcctcaggtgggcggaacaattactcgaaaacagggaggagaaatagacatgttgatcgaaatccacgccatccaaaaccacagcccggccaacctgaaccgggacgacctcggcgcacccaagacctgctacttcggcggcgtgctgcggtcgcgcatctccagccagtgcatcaagcgcagtatccgaacaagcgagcagttcaaggccttgtgcggcggaatccgtacccggcagttggcaaaattgattgctgaaaaggtaaccggcaaggccgatgtgaagaagcgcgcggcaaagatcctcaaggaatgcggcatcgctccaaaagacgaagacaagagcgacatgctcgtttacacgacgcaagaggcgatccaggagatggcggcgcttctgcaagatggcgacggaaagaccgatgaacaactggcgcaggccttcggcaacctaatcgctgatcggaccgccgtgcctgatatggcactcagcggcagaatgctcgaaaccggtgtcctgaaagacacgaccgtagaggctgcgttgcaggtaggccacgccatttctacgcacgaggcgcgcccggaagtggactactatgtcgccgccgacgacatccccggcgatgacgcgggagcgggttatgtggacgaagcaatgtttgcgtccgcctgtttctacaagtatttctcgatccactgggagacgctggtcgaaaatctgaagggcaacgaggagttggcggcccacacggtcggcgcattcattcgcgcggcggcattggcgaatccgacaggcaagcagaacagtttcgccgcccacaatccgcccgacgcgctcctcatcgagatcaaagataccccggttagctatgccaacgccttcgccaaaccggccgcgcaaggcgaacgcgacatcatcgcgcagagcattgctcaattggcgcagtacgttcacgacctcgatgtcggatatggccagccgcgacagcgattctggttctctcccaatctccgctataccttgagcgccgtgcaggataagaaggagatcgcactttctgaaaacaaccttcgagcgctcgacgaattgattcctgccgtgattgccgcaatcggccatgactgggaggaagtccagaaggttgtcgcaaaccatgaggtggccccatgagcgctaacaccctctttcttcgcctcgaaggtcccttgcaggcatggggcgatcagcagtcgaaattcgtcatccgccggaccgccgaagcgccgaccaagtccggcgtcatcggtatgctctgcgccgcattgggcgtatcgcgcgccgatgcccccgccgagtggctgccgaagctcggcgcgctgcgcatgggagttcgcatcgatgtgccgggcattcgatggtgggactatcacacggtcggcgcgggcatggaaatgcgcattgccgaagcagagggaaagaccaaacccggcgcgatgctcacgcggcgcgaatacctctgcgacgcgtcttttctcgtcgccctgcaaggcgatcccgctctcgttgccgaactggaagcggccctgaaagcacccaagtggacgctctatcttggacggaaatgctgtccgccctcgcgtcccgtgatgcaacatccatccggttcctttgaagatctccgttccgcgctcgcgtccgtgccatggcaagcccgactcaaaggagatacaccgcctaagtgtgtcgagtgtctcgttgactgggaatccacggaggaacaacctgaagcgcccgacgatgccctcgtctggtacgacgtgccgttgacattcgaaccaccggcacatcgcccacgattcgtcattcgcgagcaattgtccgttggcattgatggcgtcctaagcattgccgagacccccgcacaacggtttacaccgccgccgccgcgtcctcgagccgattatggcaacaaggaatacaaggatcgacgtaaagcccgcctcgaacaagaccaccatctctgcgtcttctgcaagtcgcccgcaaccactgttcagcacgtcacctatcgccgtgccggtggagacgagcagatagacgatctgcgttccctctgccgcctgtgccacgacgccgtcaccatgatcgagtacggccttggcatgggcctcgaccgtatcaaccccgaagaacaacgctggcgaaacaagatcatcgagaaacgcgacgaaatcgtcaaattccgttcgctggagacaaggcggcggcgtctcagcccagaggaggtcgaataatgttcctgtcccatctcttgatcgataccggaggcaatcccgaccgcccaagacccggcaggaaatggctccgcaacgtctatcacgtccatcagcgcctgtgcatggcctttccttcaaacatgcgtgtgcaggacgatccggagttcctcaagcccttcaagggagaagatttcccgttgcgcgggaacgcgaacgcggatccgcgcaatccccggcacagtttcctgttccgcatagacaacggcatcgagagcgatgccccgcgcgccatcatcctcgtccagtccgaactgaaacccaattgggactacgccttccacaacgcgcgcgtctttctcgcggccgacccggaaacccgcgaatacaaccccgcctttaccaccggcgacacgctccgttttcgcatccgaatcaacctaagcaagaagattcagtccaatagagaaggtatcgatcttcgaaaaccgcgagtggggatagacgccaaaggacgtcaaaaagatcaaagcaagcgagtggctctcacatggaacgacgatcagaagccggaagacgtaatcgtgccgtggtttgccgagaaaggcgccaaacgaggctttgaagtgaaaggtgcggcccttcttcaacttggctggtcgtcgggatttacggcggaaaaagaaaaggggatgaaattccggtccgccctgctcgaaggcacgcttgccgtggccaatcccgtgctcttttcccaaacgctggcgtcggggattggcgcggcgaaagccttcggattcggactcttgagcgtcgcgccatgcaatgtgaacccgtgacatgcgcacacacgatctgcacgaattgccgaaagtgagagacaaactcggttatctgtacgtcgagcattgtcgcatcgatcaggaagacaaggcgatcgctttgcatgatgaaaccggcgttacctccgttccatgtgcggccctttccctgctcatgctcggacccggcaccagcattacccatgcggccatactcacgctggccgacagtgcctgtcttaccgcatggtgcggcgagcaaggcatccgatactatgcctccggctccggggcgacccgcgacgcgtatgccctgctccggcaagccgccctttgttccgatgatgccgcccggctgaaagtcgtccgaagactttacgaggcccggttcaaagggaaaatcgacccctccctgacgcttcagcaactccgtgggcgtgaaggcgttcgcgttcgcgacgcctatgcccatgccgcgcgggaaacggggattcaatggcaagggcgaaactacgatcgcggcaactggaacgccgccgatcccgtcaatcgagcgctttccgccgccaatgcctgtctctacggtatctgccaggccgccatcattgccgccggttactccacggcgctcggttttatccacacgggaaagcaactttcctttgtttacgacattgccgatctttacaaatgcgacatgaccgttccactcgcttttcatgtcgcggccggccatcccatcaacttggagcgggaagtccgaatacaatgccgcgacgtgttcgcggaacaacgccttcttcaacggatcgttgacgatatcgcccagatcctcgatatcccacctgacgaagatacgcgtttggatgaggatccggccctgcccggcgcactctgggatccccggcaaggatcatgtccgggcggcatacaatacggtgctgatgactccggagatattggacatggtgatcatgattcttgaatccgtctcgccatcccttcgtggacaactcacgcggtggctgctcgaaccaaaatcaggcgtctttgtcggatccatttcggccatggtccgccaaaaactttgggaaaaggtttgcaaggaagcacgagatggcggcgccatcctcatcttttccgccaagaacgaacaaggtttcagaatagacttctggggaaaaacaacccgatggattacaaattgggaaggacttcaactagttaccaaaccaaaatgccaataaattcaatgggtattccccacgcacgtgggggtgaaccggatcgcaagaatgaggcggcgcagcaccgaatgtattccccacgcacgtgggggtgaaccggcggagatggtaagggagaaaataaaagaggggtattccccacgcacgtgggggtgaaccgagcaatgccgcgtatgaacaggccgcgcacaagtattccccacgcacgtgggggtgaaccgatccgccggtggccgcgccaagcgcgaatccggtattccccacgcacgtgggggtgaaccaagccgcccgactgatcgccgaggcgcgggcgcgtattccccacgcacgtgggggtgaaccgatttttgggatgctgttggtgccaaagtagtagtattccccacgcacgtgggggtgaaccgacgtattataactcgcccgcgggccgaggtacgtattccccacgcacgtgggggtgaaccagatgcaaaagagatggcggcgactaccacggcgtattccccacgcacgtgggggtgaaccgtatgtctcggaagaacagaaaacggccatagcgtattccccacgcacgtgggggtgaaccgaccgcgagtacattgaagaacatgccacagaagtattccccacgcacgtgggggtgaaccgtaacaaataaagcgtaaagagaaagcaaatacgtattccccacgcacgtgggggtgaaccggttcttgctgttgaagtgtgtggaacggtgacgtattccccacgcacgtgggggtgaaccgtttccatgatcttttcataatcgggatcttttgtattccccacgcacgtgggggtgaaccgagcattgaggtttcgccgcaaagcggcgaaacgtattccccacgcacgtgggggtgaaccgatcgaatcagggaaatgacacacacagatgatgtattccccacgcacgtgggggtgaaccgtcaacctcacgcgcatataacaggatccgcacgtattccccacgcacgtgggggtgaaccggaattggcgcgcagaataatgcggtccaatcggtattccccacgcacgtgggggtgaaccgtcaatccccgcgcgcatgcggggcttttacctgttggagccgcgagccgcaaaggcgcaaattttttggtgttattccctttttcatgatagtcctgaattttcgaacgttgttacaggcagccattactgaaaaaagttgttttttccggttgaatgggttacagaatcgttttgaggcattgaaggcggagtttcaccgggagccgaaatcggggcaagtgtgtgggacaggctgtccagcctgtccgtccacggacagggtgtgggttcggaagcggcaaggatgctgtgtttaccgtagaagcggcctgttgccgcttttccgtttgttggagggcgtgcgatttcgtcatgtggcgtcgaattccgattgggcccacagggtatgcgcaatcgggtgtggcaggaaaagcggagcaatgaatgggcgcgcctcccggaaaaaataaaggacgcctcactgggaggcgcccagggcatcccgtaggatggcgcccgcggatcgaaagatccttactatgatttgaaggtcaatcgccgctcaggtatactaaactatattataaacattccttccgggaatgtcaagtttttggttttcgggtgttgttcagatggggaggcctgtcatgaaaaaggcaaatgaatcgctggtgctgggactggaccttggaaccaactcgatcggctgggcgctgttcggatttgacggcgataatcccgtccgccttgtcggcatgggatcgcgcattttcgaggccggaaccgagggcgatatcgaggcgggaaaagacgaatcacgcggcgtggcacgccgaatggcgaggcaaatccgccggcagggcgaacggcgtgcaaggcggcaatccaaggtgggccgtgtgctgcaagccatgggactcctgcccgaaggggatatcgatcattcacaagcccgtcacgaatatttcgtgacactcgaccggacattgcgtgcccgccacaagaaggttaatttggaagcactgccgcatgtctttccgtattggctgagagcccgcgcactggacaatccactcgaacgggacgaactcggacgggccttctaccatctcggacaacggcgcggatttttaagcaaccgcaaggcctccggaaagaaggatgaggaaaagagcgtcgtgaaacagggcatcgccgaattggccgcggcaatacatgaaaccggcgcgcgcaccctcggcgaatacctcagccgtatagacccttcggatcccgaacagcgccgcatccgcgaacgctggaccgcccgccaaatgtacgaagacgaattcaacgccatttgggacgcccaatcgaaacatcatcccgaagtgcttacaccggaatggcggaaaatccttcataacgccctcttccggcagcgaccactcaaactccagcacgatctgatcggggcatgtccgcttgaaccggatcgcaaacgggcgcccatggccctgcccgccgcccagcgatttcgtgtacttcaaaaggtcaatgacctccgcgtcatcgcgcccgactattccgaacgcccgctcaatcccgaagaacgcaccctactgctcgacgccctcgaccgccaagaggaaatgaccttcggcaagctccgcaaactgctgaacctcaaagcgtacgtcttcaatctcgaaaacggcggcgaagaaaagctcattggcaatcgcacatccgccaagatgtacggcattttcggcgaacgctggttccggttcacgcccgcccaacgcgaggccgtcattcaagacatccgttgtttcgaaaaagacgccgcccttgctaagcgcgggcgcgagcactacggactcgatgaagagacggcaaaacgtttcggggaaatcgaactcgaagacgggtattgttcgctctcccggcaagctatcgaaaagctcttgccgctcatggagaaggggatcgcctataagacggccgaaaaagaagtctatggcgatccgggaccggccatcgctgtcgaaatgcttccgagtgtggccgaggccgtccgccagcaactcatgcccgtcctgcgcaatcccgtcgtcaatcgtgttctgaccgaactgcgcaaagtggtcaatgcgatcatcaacaagtacggcaagccggacaagattcggatcgaaatcgcgcgcgacatgaaaaaaccacggcaggagcgcatgaaaatcagccgaaaaatgcgggacaacgaaaaatcccggcaaaaggcggccaagcgcatttttgaggaaataggcgtgcagaatccctcccgcgacgatatcgaaaaggttctgctggccgaggaatgcgaatggcgatgcccctataccggcaagacaatcagcatgcgcaccctgttgggcgatgcgccgcaattcgatgttgaacacatcatcccgttcagccggtgcttggacaattccttcaacaacaagacgctctgctaccacgaggagaaccggagcgtcaaacgcaatcgcacaccgcacgaggcctatggcggcgatcccgcacgctatcaggagatcctcgatcgtgtcgctaaattcaagggtgaaggccgcgatgccaaactccgccgcttccagatggcggacctcgaggatttcgaggatttttccacccgcatgctcaacgacacccgctacgcctcgacgctggccgcgaaatatctcggactgctctacggcgccgagtaccgaaaacacatccaagtcagcaccggcgtcatcaccaagtacctgcgcgactgctgggggctcaacaaggtcctcggcgacggcggcgagaagaaccgcgaagatcaccgccaccacgccgtggacgccgtcgccatcgcgctgaccagcccgaaaaccgtcaagatgctcagcgacgccgccaagcacgccaccgaggaacgccgccgccagttcggaaaggtcccgcctccgtgggaccgtttccttcaggacattcaggaagccgccggtcaaatcgtcgtttcgcaccgcgtcgcacgcaaagtcaacggccgcatgcacgaggatacattctacagcccgcaaccctcttccgatccggccaaaccgtgcgtccatgtccgtaaacgcgtcgaggcactgtccaagggagaaatcgaggccatcgttgatcccatcgtgcggcgacaggtcaaacaacggctcgacgaactggacagcgacgatcccaagaaggcattcgccacagccgaaaaacatcccttcatcgaaaccggcgatggacgccgcctgcccattcacaaggtccgcatccgcaagaatgccgccacattcaagatcggcaaagagcatcgggtgcgccatgtcaccaccgattccaatcatcatgtcgaaatcatcgaaacgacggacaagcgcggaaatgtgaagtgggagggatccgttgtaagccggtacgaagccatgcgacgactccaaaaccgcgaacctgtcatcaagcgtgatcacggcaacggaagaaagttcctcttttcgctggcgttgaatgaagtcgtgcagatgaaggacacggaaggcgttgtacggcaatacagggtagcaggtgtgtcacagttctcaaccggccaaatagtaattgatgtccgcgagcttagcgatgcgcgtcgtgcggttgatgttcctcgtgaaggacgtacccgttcgccggacacgctccgtaagtctgaatctatcaagttttgcgcaaccccccttggggagcttcgtcgggcgaatgattgagcggatcatagacttgagcacggatgccgtccggctgtccgtgaacatggagcggctgctgatcgagcggcacaattccgattcgatcacgatgtccgccgagccggttacggttccgctagacgaggtggcggccgtcgtggcgtcgcaccggcaggtcgtcttcacgcagcctgcgctagcggggattgccgcgcatggcggggcggtcgtcgtgtgcgacggcaagatgatgccggtcggcatgatgctgcccatcgaacagcatcatctccaggccgaacggttcgtcaagcaagccgaagcggcgcttcccgtcaagaaacagatctggcgtcagattgtccaggcgaaaatcgccgcgcaggggcgcacgctcctcgacttccgcaagagcgatttcggatttttcgagatggccaaacgcgtcaagtcgggcgacacggacaatatcgaagcccacgccgcgcggcgctactggccgctgttgttcgacgatccggcattcaagcgcgaacgggaagcgccggaccagaaccgctttctcaactatggctacacggtcctgcgcgcgatggttgcccgcgcgatttgcgccaccggcctccacccatcccttggcgtccatcatcacaaccgctacgacgcgttttgtctcgccgacgaccttatggaacccttccggcccgtcgtggaccgcgccgtcgtccatatcgtctattcgcgcggcaaggaagcgcccatggacaaggaaaccaaggccgcactaatcggcgcggtgaccgggcgctatcggctcgatggtgagtctcgcaccctgttcgatattctttcccgcaccgccgcgtcgctggcgaaaatctttaccggcgaaggcaaggaactcgccttgccggtgatttaggtgattcaccacgaaggacacgaaggacacgaagaagaagtcggagttgatagacaaagttgaacattgtgcggtaggatttttttgctgcaagaggaccgcgcatgcacgaattgccggatgcgcggaagacatggaaatgaaagcaatttcgtgggccgagccgtcgtcttgattggtttcttgttccttctcttccggttcgtcttcgtgcttttcgtgttcttcgtggtgaagataccaatcaaccgaaacaaggagatgacaccatggaattcgatgccctgagcaatcgggtcatcggctgcgccatcgaggcacaccgcgaactcggtcccggcctgctcgaatccacctatgaaaaatgtctcgcatatgaactgtccacgcatggcatgaccgtggccacgcaggtcgaattgcccgtacgctacaagggggtcctcctcgattgcggctatcgcatagacgtgctggttgatgaccagatcatcatcgaagtcaagtccgtggacaaagtgattccgattcacgaggcccaattgctgacctatctcaagctcgcaaagaagcgcatcggactgctcatgaatttcaacacggtccgattgaaagacggtatccgccgatttgtaatgtgaagattcaccacgaagagcacgaagggcacgaagaaagaaagagaatgccgggtggtaaatggataacaatagggttggtggtgttttgtggttgaaaaagtcggttgtgtgtgtctgaaacttgaaaaatacaatgaatatgcacactctaatttatctggacc
